United States Patent Application Publication US 2018/0346981 A1 - sequence listing, part 2

SEQ ID NO: 17054 - DNA, 119 bp, homo sapiens
ctgtagtacagtgctgtgccctcacctccacccttcctgttgttcccacgtgggcaataccagggaccctggggaaactcaagaatgacagcttctatattttgtaattctggatgaaa

SEQ ID NO: 17055 - DNA, 119 bp, homo sapiens
cagggacccatggggaaactcaagaatgacagcttctatattttgtaattctggatgaaagataactgtttgaacaaacaggtgctccaggctttgattatagatacgacttcaaaaat

SEQ ID NO: 17056 - DNA, 119 bp, homo sapiens
gataactgtgttgaacaaacaggtgctccaggctttgattatagatacgacttcaaaaatatgctaagagcttgacttattaaggactttaacctactcaacagtatttcatatccatt

SEQ ID NO: 17057 - DNA, 119 bp, homo sapiens
atgctaagacgcttgacttattaaggactttaacctactcaacagtatttcatatccattgtggttagtactcagttatgttgagaagaatctggagctaaaagcagagatgtttgagg

SEQ ID NO: 17058 - DNA, 119 bp, homo sapiens
gtggttagttactcagttatgttgagaagaatctggagctaaaagcagagatgtttgaggtgacggtagaatgtgagcaggatggtgatgggggtttttgttaaaatgcatctgagcaa

SEQ ID NO: 17059 - DNA, 119 bp, homo sapiens
tgacggtaggaatgtgagcaggatggtgatgggggtttttgttaaaatgcatctgagcaagtcagccagcccgaagtcccctcagtgtgtgtgtctcgagtggctacctgttgggcttg

SEQ ID NO: 17060 - DNA, 119 bp, homo sapiens
gtcagccagccccgaagtcccctcagtgtgtgtgtctcgagtggctacctgttgggcttgtgggcagtgttgtacagagcctgtccattgggtgcagtcatgtagatctgaagccctga

SEQ ID NO: 17061 - DNA, 119 bp, homo sapiens
tgggcagtgattgtacagagcctgtccattgggtgcagtcatgtagatctgaagccctgaaaagcctcagtctgcatcccctttccaaggctgcttccctggtgtgtctgttctctcct

SEQ ID NO: 17062 - DNA, 119 bp, homo sapiens
aaagcctcatgtctgcatcccctttccaaggctgcttccctggtgtgtctgttctctcctctgtcccagtgctgggagcgtcctcttcagcgtcttttcctagagctggtcaccactag

SEQ ID NO: 17063 - DNA, 119 bp, homo sapiens
ctgtcccaggtgctgggagcgtcctcttcagcgtcttttcctagagctggtcaccactaggctgtcacttaaattccttgaatataagtaacagttattaatgaacttctaaatttcta

SEQ ID NO: 17064 - DNA, 119 bp, homo sapiens
gctgtcactataaattccttgaatataagtaacagttattaatgaacttctaaatttctaatttctctcctctctcttttttttttttttgttgttgttaaaaagggcctactacattg

SEQ ID NO: 17065 - DNA, 119 bp, homo sapiens
atttctctctctctctcttttttttttttttgttgttgttaaaaagggcctactacattggcgctattctaggacttctgcaacttttaaagtcttacttgtctttcttgttgcttttg

SEQ ID NO: 17066 - DNA, 119 bp, homo sapiens
gcgctattcttaggacttctgcaacttttaaagtcttacttgtctttcttgttgcttttgtattaggagtccccgtgtgggtctagaactcccctttggtaatgcttctttgttttttt

SEQ ID NO: 17067 - DNA, 119 bp, homo sapiens
tattaggagttccccgtgtgggtctagaactcccctttggtaatgcttctttgtttttttatggccctttgttctcaggatggagagaacacagaagctactatccatgtcaggattta

SEQ ID NO: 17068 - DNA, 119 bp, homo sapiens
atggcccttctgttctcaggatggagagaacacagaagctactatccatgtcaggatttattctatttaatcttattacaataaaattagtggcactttattcataaatattcatgagc

SEQ ID NO: 17069 - DNA, 119 bp, homo sapiens
ttctatttatatcttattacaataaaattagtggcactttattcataaatattcatgagcctgttaattttagttgtcttcctgtagctgaatcaacaagttattttcaactcaatttt

SEQ ID NO: 17070 - DNA, 119 bp, homo sapiens
ctgttaattgttagttgtcttcctgtagctgaatcaacaagttattttcaactcaattttatgacttgcaaaaagcttttgccctgttgtgtaccataacatttaaaagaatggaaaat

SEQ ID NO: 17071 - DNA, 119 bp, homo sapiens
atgacttgcgaaaaagcttttgccctgttgtgtaccataacatttaaaagaatggaaaatgactgaaatcaatttagattatttttagagtatttttccagcaaattcaatttattctg

SEQ ID NO: 17072 - DNA, 119 bp, homo sapiens
gactgaaatccaatttagattatttttagagtatttttccagcaaattcaatttattctgaaatttaaaccagatcttttctaatatggtattacaatgaaaagaataaagagaagatt

SEQ ID NO: 17073 - DNA, 119 bp, homo sapiens
aaatttaaatccagatcttttctaatatggtattacaatgaaaagaataaagagaagatttgaattttcgtttcattttcaaaaactatttaccaaaacaaatggagaagaaacatcca

SEQ ID NO: 17074 - DNA, 119 bp, homo sapiens
tgaattttcagtttcattttcaaaaactatttaccaaaacaaatggagaagaaacatccaaaagcacattcatttctccaaactttgtgttttaaattatagttataaattgtaaggta

SEQ ID NO: 17075 - DNA, 119 bp, homo sapiens
aaagcacatttcatttctccaaactttgtgttttaaattatagttataaattgtaaggtaattttaaatgtccctcgtattatttctccacgtctgttttagtttaatgtctcctaagc

SEQ ID NO: 17076 - DNA, 119 bp, homo sapiens
attttaaattgtccctcgtattatttctccacgtctgttttagtttaatgtctcctaagcttttctctctagcgtagacctagggaagggatgggaagattgcccagtccccgatggct

SEQ ID NO: 17077 - DNA, 119 bp, homo sapiens
ttttctctcatagcgtagacctagggaagggatgggaagattgcccagtccccgatggctgcgcacacagaggcggcggagcacaaggcaagtgagtttgcactgtcagccccagaccg

SEQ ID NO: 17078 - DNA, 119 bp, homo sapiens
gcgcacacaggaggcggcggagcacaaggcaagtgagtttgcactgtcagccccagaccgtaagcttggtacactgatgtttttctttactaaggatactattcaaaaattaacatttt

SEQ ID NO: 17079 - DNA, 119 bp, homo sapiens
taagcttggctacactgatgtttttctttactaaggatactattcaaaaattaacattttcatctcagtagtttttagaacatcaaaatgttttctgagctccaagtggctaggttgta

SEQ ID NO: 17080 - DNA, 119 bp, homo sapiens
catctcagtaagtttttagaacatcaaaatgttttctgagctccaagtggctaggttgtaaaagttttaaataatttgcaattaaaatacatgatacatattaatccattaaagactag

SEQ ID NO: 17081 - DNA, 119 bp, homo sapiens
aaagttttataataatttgcaattaaaatacatgatacatattaatccattaaagactagtgggaatgttcagccagagtagcaagtaatttttgttttataaatcatagtatctgtca

SEQ ID NO: 17082 - DNA, 119 bp, homo sapiens
tgggaatgtatcagccagagtagcaagtaatttttgttttataaatcatagtatctgtcatcttgcagtttaccaatgctgttgtaaattgaatttaaagtggtattaaaaaaaactgt

SEQ ID NO: 17083 - DNA, 119 bp, homo sapiens
tcttgcagtattaccaatgctgttgtaaattgaatttaaagtggtattaaaaaaaactgttaaacaattttatctgtttgtatatcttactatagattatgtacaagtaacatctaaat

SEQ ID NO: 17084 - DNA, 119 bp, homo sapiens
taaacaatttttatctgtttgtatatcttactatagattatgtacaagtaacatctaaataaaattacattttaaccctaagaggttttgcttattaataacagtgttgtatgtttggc

SEQ ID NO: 17085 - DNA, 119 bp, homo sapiens
taaactggacccaatgttgtgctagaaccattttaatataattatacatatctgccaaatccaggaagaaaggtttatgcatatataacttttccatttaacatctgcaagcataaacg

SEQ ID NO: 17086 - DNA, 119 bp, homo sapiens
ccaggaagaaaaggtttatgcatatataacttttccatttaacatctgcaagcataaacgacaatgatccagtttaataattcatcagggtcagagcaattgaccaatgtctctttact

SEQ ID NO: 17087 - DNA, 119 bp, homo sapiens
acaatgatctcagtttaataattcatcagggtcagagcaattgaccaatgtctctttactgctaggcttccaacagtaaattacagatgaattagtgtccttttgcttctcttctctga

SEQ ID NO: 17088 - DNA, 119 bp, homo sapiens
gctaggcttaccaacagtaaattacagatgaattagtgtccttttgcttctcttctctgactctctttgccagagacattttgtcgtaaagtttcagtgcagctcacctccagccaaag

SEQ ID NO: 17089 - DNA, 119 bp, homo sapiens
ctctctttgtccagagacattttgtcgtaaagtttcagtgcagctcacctccagccaaaggtaatcttttagatcagtactcagttgctctgaattttgcttataattataacctattt

SEQ ID NO: 17090 - DNA, 119 bp, homo sapiens
gtaatctttttagatcagtactcagttgctctgaattttgcttataattataacctatttaatcacagagaacccctgcagaggtggagttcaaggttgcatacaataacaggagatca

SEQ ID NO: 17091 - DNA, 119 bp, homo sapiens
aatcacagaagaacccctgcagaggtggagttcaaggttgcatacaataacaggagatcacagttttgagtctagcacagattaaaaaccacagatgtaccatttataagacacacact

SEQ ID NO: 17092 - DNA, 119 bp, homo sapiens
cagttttgaagtctagcacagattaaaaaccacagatgtaccatttataagacacacactgattgtctctaaactacatattgactccttatgaacattattttttaaataaagtagtg

SEQ ID NO: 17093 - DNA, 119 bp, homo sapiens
gattgtctcttaaactacatattgactccttatgaacattattttttaaataaagtagtgcatctaggaaatcagtcacacaattcacacagccctgaaaagttttttcagtgccaact

SEQ ID NO: 17094 - DNA, 119 bp, homo sapiens
catctaggacaatcagtcacacaattcacacagccctgaaaagttttttcagtgccaactaccagttggcatgaaacgtgaatgagcttgagacactgttcattcctaagattcaacca

SEQ ID NO: 17095 - DNA, 119 bp, homo sapiens
accagttggtcatgaaacgtgaatgagcttgagacactgttcattcctaagattcaaccaaggattggcaaaacaatggaacacctctgcttaagaaggctatgaccttccctcccttc

SEQ ID NO: 17096 - DNA, 119 bp, homo sapiens
aggattggctaaaacaatggaacacctctgcttaagaaggctatgaccttccctcccttccttcacaactagttttgtttgattttatttttggtggtgtttggttgcacatggctaga

SEQ ID NO: 17097 - DNA, 119 bp, homo sapiens
cttcacaacttagttttgtttgattttatttttggtggtgtttggttgcacatggctagaatgcttttgtcactttgcaaatcaggataaccaatgatctaaaactatgacaggatctt

SEQ ID NO: 17098 - DNA, 119 bp, homo sapiens
atgcttttgatcactttgcaaatcaggataaccaatgatctaaaactatgacaggatcttaagcagattgtttgtccatttcatgttgctggtttgtaggcccctctaaggcccttcgt

SEQ ID NO: 17099 - DNA, 119 bp, homo sapiens
aagcagattggtttgtccatttcatgttgctggtttgtaggcccctctaaggcccttcgtttttccttcatgcctctcggaactttgatcagatgagtctgagcatcatcccatctaac

SEQ ID NO: 17100 - DNA, 119 bp, homo sapiens
ttttccttctatgcctctcggaactttgatcagatgagtctgagcatcatcccatctaactcttttaacaatgcctggctaaaactggaatgtccagcccagtatatttaaaaatcacc

SEQ ID NO: 17101 - DNA, 119 bp, homo sapiens
tcttttaaccaatgcctggctaaaactggaatgtccagcccagtatatttaaaaatcacccacaaaaagggttctacaggtcttcacaaaacctggaatttccacgaggatgtctgatc

SEQ ID NO: 17102 - DNA, 119 bp, homo sapiens
cacaaaaagaggttctacaggtcttcacaaaacctggaatttccacgaggatgtctgatctttataatcaagcagtcagcattgaagttaagcttccaggaggcagtttggtccttata

SEQ ID NO: 17103 - DNA, 119 bp, homo sapiens
tttataatccaagcagtcagcattgaagttaagcttccaggaggcagtttggtccttataatccaagcatcagtggttgagttaaaacccaagcttgaagctccatatccctgggtgga

SEQ ID NO: 17104 - DNA, 119 bp, homo sapiens
atccaagcaatcagtggttgagttaaaacccaagcttgaagctccatatccctgggtggaaagagaagcggggactgattgagatggctggtgactgcattggtacccatgggactgag

SEQ ID NO: 17105 - DNA, 119 bp, homo sapiens
aagagaagctggggactgattgagatggctggtgactgcattggtacccatgggactgagtgtggccccggtccgggaagctggtgatgcataggggtcaaatatgatccacagtccat

SEQ ID NO: 17106 - DNA, 119 bp, homo sapiens
tgtggcccctggtccgggaagctggtgatgcataggggtcaaatatgatccacagtccatgcccccaaataggaagttgagccagcatatccttgactataacctgaagcctgagtata

SEQ ID NO: 17107 - DNA, 119 bp, homo sapiens
gcccccaaagtaggaagttgagccagcatatccttgactataacctgaagcctgagtataggtcatgggtaggacctctgcatgcaggaagaggaggtggacaagggatctgacagtgg

SEQ ID NO: 17108 - DNA, 119 bp, homo sapiens
ggtcatgggataggacctctgcatgcaggaagaggaggtggacaagggatctgacagtggggagatggagctgggctccagatagacacaggagcactgctgctggcaatggtcgggac

SEQ ID NO: 17109 - DNA, 119 bp, homo sapiens
ggagatggaagctgggctccagatagacacaggagcactgctgctggcaatggtcgggactgaggtgctgaggggggagtgaattggccacttgttccactctctgaactcacttcccg

SEQ ID NO: 17110 - DNA, 119 bp, homo sapiens
tgaggtgctagaggggggagtgaattggccacttgttccactctctgaactcacttcccgagctggagagtcttctttttggcaggtctcactttgttttgacctccattctgctgttg

SEQ ID NO: 17111 - DNA, 119 bp, homo sapiens
agctggagatgtcttctttttggcaggtctcactttgttttgacctccattctgctgttgttgctgttgtggcggcacttagctcttcgattcttaaaccataccttggaagggaaaga

SEQ ID NO: 17112 - DNA, 119 bp, homo sapiens
aggaaggatggttctgcctgcatctgccctacctgcaccctcgactcgggcaagttgattttcagtgcccctcctctcgcatgaagatgtctgggtaccgggtcttggcaaacagtgct

SEQ ID NO: 17113 - DNA, 119 bp, homo sapiens
ttcagtgccacctcctctcgcatgaagatgtctgggtaccgggtcttggcaaacagtgcttccagcacactagctgcgcccgagtgaacgtcgtcctctcccggcgctgtttccggggg

SEQ ID NO: 17114 - DNA, 119 bp, homo sapiens
tccagcacatctagctgcgcccgagtgaacgtcgtcctctcccggcgctgtttccggggggtggctgcggacaagaagcccagggccctttagggtgggggagcagtttctcagtcata

SEQ ID NO: 17115 - DNA, 119 bp, homo sapiens
gtgcgggagtgcagcagggctcacttacccgggtagcccacggaggggtgcagcaagtccatacccgaatggtcagactcagcccattgactgcgtaaggcggttgcttaagataagac

SEQ ID NO: 17116 - DNA, 119 bp, homo sapiens
atacccgaagtggtcagactcagcccattgactgcgtaaggcggttgcttaagataagacatcatgctaggttgtttggaggtgcaaagtcggcccaaatcgggggtacccagctggaa

SEQ ID NO: 17117 - DNA, 119 bp, homo sapiens
atcatgctaaggttgtttggaggtgcaaagtcggcccaaatcgggggtacccagctggaagatcttgatcgcccggggtggacaggttcagagtccttggtgggtgggtttggagcagt

SEQ ID NO: 17118 - DNA, 119 bp, homo sapiens
gatcttgatgcgcccggggtggacaggttcagagtccttggtgggtgggtttggagcagtggaactaaggcaaagcaaacaaacaaacagaggggctggtttactgcttcggaggcagc

SEQ ID NO: 17119 - DNA, 119 bp, homo sapiens
ggaactaagggcaaagcaaacaaacaaacagaggggctggtttactgcttcggaggcagcagctcttcccgttccagcactaacttaaaaagagcacggactaggcgaggcagaggctt

SEQ ID NO: 17120 - DNA, 119 bp, homo sapiens
acaagacagacggacacttaccttacagcctcatgggaggttagaaaaagtcaaatatcctttaaattcaaatagccagctatcctaaaagaaatcaagagtattgagttagaaacctt

SEQ ID NO: 17121 - DNA, 119 bp, homo sapiens
tttaaattccaaatagccagctatcctaaaagaaatcaagagtattgagttagaaaccttgcagtcttccccttccatgaaaagtcaaacacaaccaaaaaaaattttttttaaagaac

SEQ ID NO: 17122 - DNA, 119 bp, homo sapiens
gcagtcttcacccttccatgaaaagtcaaacacaaccaaaaaaaattttttttaaagaacgaaaatgagaaggcggctagagttctaaacacgcgtgggcccctctgcaatacatacaa

SEQ ID NO: 17123 - DNA, 119 bp, homo sapiens
gaaaatgaggaaggcggctagagttctaaacacgcgtgggcccctctgcaatacatacaaagtagatgtgcgagtgagggctgctctagcaatttttatttttaatcacagtggaggct

SEQ ID NO: 17124 - DNA, 119 bp, homo sapiens
agtagatgtggcgagtgagggctgctctagcaatttttatttttaatcacagtggaggctgtgttggagtgaggccggtcccgctctcagggagatttgctgagaaagcgcctctctgg

SEQ ID NO: 17125 - DNA, 119 bp, homo sapiens
tgggatttcaaggatcagaagcaaaggtaccctcaaacatttcctaacattagcatacatggagagcaagggatgcaaaagtgttttactaccaggagttcacaaatctgtggacagca

SEQ ID NO: 17126 - DNA, 119 bp, homo sapiens
ggagagcaaagggatgcaaaagtgttttactaccaggagttcacaaatctgtggacagcacaccagtgagattccacggtgttggggaggcaggcagggtggtactcatgacccagagg

SEQ ID NO: 17127 - DNA, 119 bp, homo sapiens
caccagtgaggattccacggtgttggggaggcaggcagggtggtactcatgacccagaggcagagacagagcaagagcccttgggcccactgcacccacagcttcacattgtgaaggag

SEQ ID NO: 17128 - DNA, 119 bp, homo sapiens
cagagacaggagcaagagcccttgggcccactgcacccacagcttcacattgtgaaggaggccgggagaggggaacaggcaggggtgggaagcagcccaaccttgggttttggaaaaag

SEQ ID NO: 17129 - DNA, 119 bp, homo sapiens
gccgggagaaggggaacaggcaggggtgggaagcagcccaaccttgggttttggaaaaagattgcatagtcgttaaaaccctgacctcttttttttttttccgctctgtcctgggtgac

SEQ ID NO: 17130 - DNA, 119 bp, homo sapiens
attgcatagctcgttaaaaccctgacctcttttttttttttccgctctgtcctgggtgaccagggtgtcgccagcacttggacacgtcagaccccaccacctcctgttgggttatctgc

SEQ ID NO: 17131 - DNA, 119 bp, homo sapiens
cagggtgtctgccagcacttggacacgtcagaccccaccacctcctgttgggttatctgcttttccctcttgggggggtggggagcatttctggagtaggaaaggactggggcatgggg

SEQ ID NO: 17132 - DNA, 119 bp, homo sapiens
ttttccctctttgggggggtggggagcatttctggagtaggaaaggactggggcatggggcggggtgcgagggcctggagagaggccatgggtcccggggctggaccacagcggggctg

SEQ ID NO: 17133 - DNA, 119 bp, homo sapiens
cggggtgcggagggcctggagagaggccatgggtcccggggctggaccacagcggggctgtgggaagggcctaaccttcacaggcccccttcctggttaaggttttttttttgctgaaa

SEQ ID NO: 17134 - DNA, 119 bp, homo sapiens
tgggaagggtcctaaccttcacaggcccccttcctggttaaggttttttttttgctgaaagggccacagatatatttgtggtgtaaaccccagaggctgccactgctttcctggggagc

SEQ ID NO: 17135 - DNA, 119 bp, homo sapiens
gggccacaggatatatttgtggtgtaaaccccagaggctgccactgctttcctggggagcttggaggcccacccatgtgactgcagggcaggatggtggacttctaggcccctacagcc

SEQ ID NO: 17136 - DNA, 119 bp, homo sapiens
ttggaggccacacccatgtgactgcagggcaggatggtggacttctaggcccctacagcctcggcagtgcctcagatccggatgtggaaagtgctagaaagagagaaagggcaagagag

SEQ ID NO: 17137 - DNA, 119 bp, homo sapiens
ccggcccctgtagtggcagcacctgaggaagtcaggggccttggcaatcatgtcctcgaagtcagcaaacccagcttgccgtcaccgtccaagtcagcctcctcaatgaccttgtcgca

SEQ ID NO: 17138 - DNA, 119 bp, homo sapiens
gtcagcaaagcccagcttgccgtcaccgtccaagtcagcctcctcaatgaccttgtcgcacacaagcacacctcctcctcatccagctctgacttagtgagccgggccagcgtcagctc

SEQ ID NO: 17139 - DNA, 119 bp, homo sapiens
cacaagcaccacctcctcctcatccagctctgacttagtgagccgggccagcgtcagctccaggtcctcttgcagatgaagttgtcagtgttgaagtctgtagggcaggggttggacat

SEQ ID NO: 17140 - DNA, 119 bp, homo sapiens
tgttcccccaccgcatattcaggccccctcctctagccctggttaccatagatcttgaaggcatagtttccttgagctctcggggagccgactcgcagagcacggaaaacatgtccaca

SEQ ID NO: 17141 - DNA, 119 bp, homo sapiens
gcatagtttgccttgagctctcggggagccgactcgcagagcacggaaaacatgtccacaaagtcgttgaagtgaggttcccctcaccatcctcggaaaacgccgccacgatcctttct

SEQ ID NO: 17142 - DNA, 119 bp, homo sapiens
aagtcgttgaaagtgaggttcccctcaccatcctcggaaaacgccgccacgatcctttctttgaagggatctcctgaagaaaacacacacagcaatcactgtgggtgcaggataagcag

SEQ ID NO: 17143 - DNA, 119 bp, homo sapiens
cgcccgggctccgactcccatcagcggccgccagacccggagccagcgccccgtgcccgcggccctcggagccccgcggctggcagcggcccacggtggccggacccttcccgccccgc

SEQ ID NO: 17144 - DNA, 119 bp, homo sapiens
ggccctcggcagccccgcggctggcagcggcccacggtggccggacccttcccgccccgcagctcgcctgaggaggcgcgcgggggtctcggaggcggggacgggaacccggagcggca

SEQ ID NO: 17145 - DNA, 119 bp, homo sapiens
agctcgcctggaggaggcgcgcgggggtctcggaggcggggacgggaacccggagcggcagcgactccgcgccggcgggaagagggcggggcacccggctccgcggctgcagcgcgccc

SEQ ID NO: 17146 - DNA, 119 bp, homo sapiens
gcgactccgccgccggcgggaagagggcggggcacccggctccgcggctgcagcgcgcccgggtcccggaggaggcgacctggccccgggagacgctgcccggcacgaacccttggctc

SEQ ID NO: 17147 - DNA, 119 bp, homo sapiens
aatggggtaccaagtacacgaatctctctatattattgtttctttaactgcatgtgagtctgggattatccaaaataaaagtgttaatttgtaaaaagtacacacagcatggcagttcc

SEQ ID NO: 17148 - DNA, 119 bp, homo sapiens
cagagattctgatttaagggtctagccgggagcctgggcatgtgcttgaggcccccaggtgagtccagatacagcggggctgagagtcgctgttgacattggctgcagggtggacaggg

SEQ ID NO: 17149 - DNA, 119 bp, homo sapiens
gagtccagagtacagcggggctgagagtcgctgttgacattggctgcagggtggacagggcgagatgggcctgcccgggcagacctgtgtattgctaggtccttccggctctgatgctc

SEQ ID NO: 17150 - DNA, 119 bp, homo sapiens
cgagatgggccctgcccgggcagacctgtgtattgctaggtccttccggctctgatgctctgtgataatggccactttctctgccattttcctcccagagagcaaacacaggtctagac

SEQ ID NO: 17151 - DNA, 119 bp, homo sapiens
tgtgataattggccactttctctgccattttcctcccagagagcaaacacaggtctagactcaatatcggtggagctatcgatgaccacgggtcacttccatctccagcactgcaggct

SEQ ID NO: 17152 - DNA, 119 bp, homo sapiens
tcaatatcgtgtggagctatcgatgaccacgggtcacttccatctccagcactgcaggctgtgcgggctgtccaactggggtacggttgagggtcctggctcagaccaggcctgactcc

SEQ ID NO: 17153 - DNA, 119 bp, homo sapiens
gtgcgggctggtccaactggggtacggttgagggtcctggctcagaccaggcctgactcctgggccagttgtaaaacaggcccttctgggccagcagctgggccgggctgccgctctct

SEQ ID NO: 17154 - DNA, 119 bp, homo sapiens
tgggccagtctgtaaaacaggcccttctgggccagcagctgggccgggctgccgctctctgccacctgcccttgtccatgaccagaaccctgtgggggagagggagacagagaggctct

SEQ ID NO: 17155 - DNA, 119 bp, homo sapiens
tcaggccggggcgggagccttaccgggcacagtccatcacggagcgcaggcggtgggcaatgagcagcaagtgcactgtgcaaaccagctcccgagcatggcctgcatctgcagctccg

SEQ ID NO: 17156 - DNA, 119 bp, homo sapiens
tgagcagcacagtgcactgtgcaaaccagctcccgagcatggcctgcatctgcagctccgtgccagggtcacggcagcagtagcctcgtccaggatgaggatctgggtcttccggagaa

SEQ ID NO: 17157 - DNA, 119 bp, homo sapiens
tgccagggtccacggcagcagtagcctcgtccaggatgaggatctgggtcttccggagaagggcacgtgcagacacaggagctgtttctggcccacgctgggaacgattgggacaatta

SEQ ID NO: 17158 - DNA, 119 bp, homo sapiens
ccacctgcaggtcccagccatggtgggacgaccatacctcaggtcctcgcctcggtcagcacacttgtatgcagctggccgggcaggctggccaccaaggctttgagctgcaccgtctc

SEQ ID NO: 17159 - DNA, 119 bp, homo sapiens
acacttgtactgcagctggccgggcaggctggccaccaaggctttgagctgcaccgtctccagggctgccagatagcctcgtccgagtgctcctgcagcaggtcgaggttcatccgcag

SEQ ID NO: 17160 - DNA, 119 bp, homo sapiens
cagggctgcccagatagcctcgtccgagtgctcctgcagcaggtcgaggttcatccgcagagagccaggaacaggatggggtcctggcggggaggggcggtgggtcagagccgggtccc

SEQ ID NO: 17161 - DNA, 119 bp, homo sapiens
ccatgcctcccatctttgcccaccccctccaccagcctcacctgggggatgatgctgatcctggagcgcgtgtgtgcagccccacgtgggcaatggggaccccgtcgatccagatccca

SEQ ID NO: 17162 - DNA, 119 bp, homo sapiens
ctggagcgcagtgtgtgcagccccacgtgggcaatggggaccccgtcgatccagatcccaccctcagctcctcctggagccgcagcagcccactggccagggaggacttccctgccccg

SEQ ID NO: 17163 - DNA, 119 bp, homo sapiens
ccctcagctgcctcctggagccgcagcagcccactggccagggaggacttccctgccccggtcctgccacgatgcccacctgcccggggttgggaggaaaggcctgctctgaccagagg

SEQ ID NO: 17164 - DNA, 119 bp, homo sapiens
ctttggcctaaactccatgaagaagacattgtgagagaaccactcaccttctctcctgcgtggatcttgaggacacgccctgcacagccagcgggagctcaggtcggtatcttagccca

SEQ ID NO: 17165 - DNA, 119 bp, homo sapiens
tggatcttgaaggacacgccctgcacagccagcgggagctcaggtcggtatcttagcccaaagtcccggactcgatctgcccgccctgaggccaggggggctgagctgcacatgtgggc

SEQ ID NO: 17166 - DNA, 119 bp, homo sapiens
aagtcccggaactcgatctgcccgccctgaggccaggggggctgagctgcacatgtgggcagcctccaggagcctggagcaggaggggaaactgagtcagaggagccttcctctaagac

SEQ ID NO: 17167 - DNA, 119 bp, homo sapiens
ccgacagtctctgcctctgtctgtccctcaagcccagtttggggatgtggggagtacctggagggcagcgagacagagaagcccacgaggccagcactgaggtgggctttgctcagcac

SEQ ID NO: 17168 - DNA, 119 bp, homo sapiens
gagggcagcagagacagagaagcccacgaggccagcactgaggtgggctttgctcagcacagcacacgtgcagctgcaaacaccaggccattccccaggagctccacattggccgcaag

SEQ ID NO: 17169 - DNA, 119 bp, homo sapiens
agcacacgtggcagctgcaaacaccaggccattccccaggagctccacattggccgcaagccacctgcaagggaagcgacagcagggtgagtggttactctcatctgcagggagatgct

SEQ ID NO: 17170 - DNA, 119 bp, homo sapiens
tctgccctggctcttcctacctgtcagccaccagtcgcgggaaactgatcctctggctttcatctacgcagcattgttctgagccacaaagggggcctgggttcggaatgcccggacca

SEQ ID NO: 17171 - DNA, 119 bp, homo sapiens
catctacgcgagcattgttctgagccacaaagggggcctgggttcggaatgcccggaccactgtgctgcctggaacgtctcagccatgtgggagcagacagacgagtagctggctgact

SEQ ID NO: 17172 - DNA, 119 bp, homo sapiens
ctgtgctgccctggaacgtctcagccatgtgggagcagacagacgagtagctggctgactccaagcgtccagctggcatgagctaaccacatacaggctctgagaaggatggatgggag

SEQ ID NO: 17173 - DNA, 119 bp, homo sapiens
ggaagcctccctgacctctccgtacctgaaacccagcgtagaggagaaacagtggcaggatggccacagggccagtggggtagccactgccaccaccaggctgacctccaggagtccaa

SEQ ID NO: 17174 - DNA, 119 bp, homo sapiens
tggccacagtggccagtggggtagccactgccaccaccaggctgacctccaggagtccaaaggcgtacacagcagggaccggagtttgtctggaatgtccacgtcaaccgtgtctgtct

SEQ ID NO: 17175 - DNA, 119 bp, homo sapiens
aggcgtacatcagcagggaccggagtttgtctggaatgtccacgtcaaccgtgtctgtctccttggagagcggtttagcaggtgaccaatgggtgtccgctcaaagaagctgatgggag

SEQ ID NO: 17176 - DNA, 119 bp, homo sapiens
ccttggagaagcggtttagcaggtgaccaatgggtgtccgctcaaagaagctgatgggagatcgcaccaatcccacaggagcctctggaagagcaacctggatgcccgggccccaccta

SEQ ID NO: 17177 - DNA, 119 bp, homo sapiens
atcgcaccacatcccacaggagcctctggaagagcaacctggatgcccgggccccacctaggagcaccgagccatggaggcaaacagcccaatggctggggagggagaggaggtaagag

SEQ ID NO: 17178 - DNA, 119 bp, homo sapiens
ggcaggtgaggcgtaccttggagacagccgaggagcccgaagatcccgccacgcagggctgcctgcgtcgctgcccacctactgcagggtcgtccgcccacaggctcagccagtagccc

SEQ ID NO: 17179 - DNA, 119 bp, homo sapiens
gcctgcgtctgctgcccacctactgcagggtcgtccgcccacaggctcagccagtagccccggcagaagaggccacttgctggcagaggaagaggaagagtgcgtagaggcagaggggg

SEQ ID NO: 17180 - DNA, 119 bp, homo sapiens
cggcagaaggaggccacttgctggcagaggaagaggaagagtgcgtagaggcagaggggggtgcccacgcacgcaggtaggccaggtgcactgtggccttcacctgtagcacacatgag

SEQ ID NO: 17181 - DNA, 119 bp, homo sapiens
aggcctggagaatcagcaaagcccacctagtacctccttctcctctatctcctggctgtctggcttgatcagaagacacatgagggcccccttcctctgcagaagctcctggtaggaac

SEQ ID NO: 17182 - DNA, 119 bp, homo sapiens
tggcttgatccagaagacacatgagggcccccttcctctgcagaagctcctggtaggaacccatctctggatggccccatttgccagcactatgatccaatcagcctggggcaggatgt

SEQ ID NO: 17183 - DNA, 119 bp, homo sapiens
ccatctctgcgatggccccatttgccagcactatgatccaatcagcctggggcaggatgtggagtgcgtcgtcacgagaatccgtgtctgggcagggaaggggtagaagttacacacat

SEQ ID NO: 17184 - DNA, 119 bp, homo sapiens
tgccctgtactgtctgacacatgttcccaaacttactgttccctggagtagtccaccaggcccaatgactggttgaagacatgctggccaacgtgggcatccagggccgccagggggtc

SEQ ID NO: 17185 - DNA, 119 bp, homo sapiens
cccaatgacctggttgaagacatgctggccaacgtgggcatccagggccgccagggggtcatccagcagtacacagctgcctttctgtatacagcccgggccaggctcagccgctgctt

SEQ ID NO: 17186 - DNA, 119 bp, homo sapiens
atccagcaggtacacagctgcctttctgtatacagcccgggccaggctcagccgctgcttctggcctccgagagattcatgccctgtggccacaaaaggaacagtggcctgagtcagca

SEQ ID NO: 17187 - DNA, 119 bp, homo sapiens
tccctgtcccaaaaagacccccaaactctcacctgctccccaattgaagtgtggattccctcagggaagtgtccacatctggctgcagggcacaggcttctagtactctctccagccag

SEQ ID NO: 17188 - DNA, 119 bp, homo sapiens
tcagggaagctgtccacatctggctgcagggcacaggcttctagtactctctccagccagggtgggtccgctcctgcccgaagcacacattctctaccacagaggtgttctgcacccag

SEQ ID NO: 17189 - DNA, 119 bp, homo sapiens
ggtgggtccagctcctgcccgaagcacacattctctaccacagaggtgttctgcacccaggcctcctgggcacgtaggccacagcaccctaaaacacaacttactttggtcacaggagg

SEQ ID NO: 17190 - DNA, 119 bp, homo sapiens
ggaagtgggactttcaggatggggacatcctagcagacaggctgggggtggcctcacctcgatgctcacaacccctccacctttgacagctccccaaggagggcggacagcagggagga

SEQ ID NO: 17191 - DNA, 119 bp, homo sapiens
gatgctcacgaacccctccacctttgacagctccccaaggagggcggacagcagggaggacttccctgccccactggaccgacaacagccagcagacagccctggggcaccgtgaggtt

SEQ ID NO: 17192 - DNA, 119 bp, homo sapiens
cttccctgcccccactggaccgacaacagccagcagacagccctggggcaccgtgaggtttattctggaacgcaagaggggagacatgaccttggttagggttcagcccgcctctgtga

SEQ ID NO: 17193 - DNA, 119 bp, homo sapiens
agcccacgcactctcccaggatggctccagcccttgcacccacctcacctggacgagggagtggatggaaagggcaggaaagcctgggccttgttgaggatgttgagaactgtgagagt

SEQ ID NO: 17194 - DNA, 119 bp, homo sapiens
gtggatggagaagggcaggaaagcctgggccttgttgaggatgttgagaactgtgagagtcacaaaggcttctctgcattcatagcattctcggccaccagagtgtggacagcaaacac

SEQ ID NO: 17195 - DNA, 119 bp, homo sapiens
cacaaaggctttctctgcattcatagcattctcggccaccagagtgtggacagcaaacaccaccagtgcacctggggggtgggggggacacgtggggcaacagtgagacacgcaagcat

SEQ ID NO: 17196 - DNA, 119 bp, homo sapiens
agactagagtgacgtcaccagaaatgtagacacttggaaggacaccagcgacacagagaagaggaggccgaggtccgcaaggcgcccagctcctggcctcggatgcccaggactctgtc

SEQ ID NO: 17197 - DNA, 119 bp, homo sapiens
gaggaggccggaggtccgcaaggcgcccagctcctggcctcggatgcccaggactctgtccagaaaggcccctcccagccatggaacttgatggtcttcgagttcctgaggatagagct

SEQ ID NO: 17198 - DNA, 119 bp, homo sapiens
cagaaaggctccctcccagccatggaacttgatggtcttcgagttcctgaggatagagctggtgagccggcccgtgagtccttctgcctcatttgctcctcctgggatcggagggaaaa

SEQ ID NO: 17199 - DNA, 119 bp, homo sapiens
gggactccgttcaaatcccgtcttcctcctctggcatacctgccagagatagacgaagcagaccacgatcagacgagaggcagccacagcccgttgaggtagaggacgctctcggtcag

SEQ ID NO: 17200 - DNA, 119 bp, homo sapiens
gaccacgatccagacgagaggcagccacagcccgttgaggtagaggacgctctcggtcagccgctgcactccacggacaccagattgaccacatcacccaccgcactggcctttctgga

SEQ ID NO: 17201 - DNA, 119 bp, homo sapiens
ccgctgcacgtccacggacaccagattgaccacatcacccaccgcactggcctttctggagccgctggaagagccaggacctggcgggtgggcagaaggagagaagtaaagtggggagg

SEQ ID NO: 17202 - DNA, 119 bp, homo sapiens
ggaagacctgcccttgtcccccagggctcacctttctgtacaccaggccagtgatggccgaccgcaacccatctgcagcaccttgagcctgtacatgttctgctgctcaaacagcgttt

SEQ ID NO: 17203 - DNA, 119 bp, homo sapiens
accgcaacctcatctgcagcaccttgagcctgtacatgttctgctgctcaaacagcgtttgcaggcaggtgagaggaacatcagcacggcgaggaggtagcccttccaggctggaggct

SEQ ID NO: 17204 - DNA, 119 bp, homo sapiens
gcaggcaggctgagaggaacatcagcacggcgaggaggtagcccttccaggctggaggcttgggatcacaataaactccaggaaaaggcttgcaggggaaggagggagaaggtacagct

SEQ ID NO: 17205 - DNA, 119 bp, homo sapiens
ttgaggtctgggactcacctgagcagcttggggacagtgaacctgaagacatcactgatgatgaggctggggtccccaggaggaaggtagaatggaacacctgccagatggccttcagc

SEQ ID NO: 17206 - DNA, 119 bp, homo sapiens
atgaggctgagggtccccaggaggaaggtagaatggaacacctgccagatggccttcagcagtgggcgcactggctcccttcttgccgtaggaagggctcggtctctggagccttcatg

SEQ ID NO: 17207 - DNA, 119 bp, homo sapiens
agtgggcgccactggctcccttcttgccgtaggaagggctcggtctctggagccttcatgccactgccgctttccttttaaatgctattgccttgttgtgcctgaggggaagggagaga

SEQ ID NO: 17208 - DNA, 119 bp, homo sapiens
tgatgagcttttctgaagtagcatcaggtgagttcttgacctccacccacttacctccgggctgcactgggttcctcatccactccttttcaagccgggaaacaagttcttctgaggag

SEQ ID NO: 17209 - DNA, 119 bp, homo sapiens
gctgcactgcggttcctcatccactccttttcaagccgggaaacaagttcttctgaggagttttctctccaagcgaccagaggtcttttggtctcagtggcctcctgtatcccctccag

SEQ ID NO: 17210 - DNA, 119 bp, homo sapiens
ttttctctcccaagcgaccagaggtcttttggtctcagtggcctcctgtatcccctccagaccaggctgaaaagaggggcaccagggaaagcttttcctgccattcacccctgcaggat

SEQ ID NO: 17211 - DNA, 119 bp, homo sapiens
gggggagactgagacctcaaagtggaacaggaatgaggttggaacttggtgacttacagactgctggggtcttcagggaagaaggggggttgatccgccaggcaggacagcacaaactg

SEQ ID NO: 17212 - DNA, 119 bp, homo sapiens
ctgctgggggtcttcagggaagaaggggggttgatccgccaggcaggacagcacaaactgtgccaccacagagacaggcataggtaggtggacaggtggcggacagggtcgctctggaa

SEQ ID NO: 17213 - DNA, 119 bp, homo sapiens
tgccaccaccagagacaggcataggtaggtggacaggtggcggacagggtcgctctggaagccctgtggagggaaagcagaagataaggaatggagacagaggagggtgctcagaggag

SEQ ID NO: 17214 - DNA, 119 bp, homo sapiens
acccaaggcatgagccaccattttggtttcccagggtggcccacgccccgacttaccgctccggaggccgctgggcagcgttggtagctggcaagacaaagcagagaagccagtaacca

SEQ ID NO: 17215 - DNA, 119 bp, homo sapiens
ccggaggcctgctgggcagcgttggtagctggcaagacaaagcagagaagccagtaaccaaacagcactcagatgactggactccctttttcctctcggtgtgaatcaggaacactgcg

SEQ ID NO: 17216 - DNA, 119 bp, homo sapiens
aacagcactccagatgactggactccctttttcctctcggtgtgaatcaggaacactgcgaagctctggcgggaaagtcagggaggccccttaggggagggtgggaggctgaggggagc

SEQ ID NO: 17217 - DNA, 119 bp, homo sapiens
tggcaggcaaagcagcagctgggaggaagccgggctccagactgaaggcatcattaccatcgtggtgagcacacagtaggatgaatgaggaattctggggcctcaggcgttccctgttg

SEQ ID NO: 17218 - DNA, 119 bp, homo sapiens
cgtggtgagccacacagtaggatgaatgaggaattctggggcctcaggcgttccctgttggattttccaagagcgacagccacgctggaggtacacaggactatgagggcgaatccaag

SEQ ID NO: 17219 - DNA, 119 bp, homo sapiens
gattttccaaagagcgacagccacgctggaggtacacaggactatgagggcgaatccaagcacctgaggtacaggcttagataagcttggggggcaataagagaggtcacagcaaactg

SEQ ID NO: 17220 - DNA, 119 bp, homo sapiens
gaatgaactctgaagaacattctttggaagcctacaagaatggagtagaagaggatggatgagcagaaagctcacacttggaatgccagtgtttatttaacacactaaggtaaatacat

SEQ ID NO: 17221 - DNA, 119 bp, homo sapiens
gagcagaaaggctcacacttggaatgccagtgtttatttaacacactaaggtaaatacatatcacatataaaattgtcctataatacagccagtgggggaacataaaaataaatgcata

SEQ ID NO: 17222 - DNA, 119 bp, homo sapiens
taaaaggttcatcctaatgtggctctaaaattaccttgtgtatccaagagtctacatggtatgttttggaaatgccaggttatggtagctataaactgtccaggaacatgggagtgtat

SEQ ID NO: 17223 - DNA, 119 bp, homo sapiens
atgttttggaaaatgccaggttatggtagctataaactgtccaggaacatgggagtgtatgcgtatgttgcgcatgcgtggattttcggaattacaaaatctgtttgggagaaccgtgt

SEQ ID NO: 17224 - DNA, 119 bp, homo sapiens
gcgtatgtttgcgcatgcgtggattttcggaattacaaaatctgtttgggagaaccgtgttccactgagtgacctctgtagcctttctaatattgctctgtttgattaacagattccct

SEQ ID NO: 17225 - DNA, 119 bp, homo sapiens
tccactgagttgacctctgtagcctttctaatattgctctgtttgattaacagattcccttctacacccgataggaggagtctactttaagacttcaccaggttccagcctgtcccctg

SEQ ID NO: 17226 - DNA, 119 bp, homo sapiens
tctacaccccgataggaggagtctactttaagacttcaccaggttccagcctgtcccctgcctcccccgacattgcctggttccaggctcccagggatggcagctaccatcttggcttt

SEQ ID NO: 17227 - DNA, 119 bp, homo sapiens
cctcccccgaacattgcctggttccaggctcccagggatggcagctaccatcttggctttgaagagtgggacatccggaggtagccccggccatggtggtggatgaagaggaggtagat

SEQ ID NO: 17228 - DNA, 119 bp, homo sapiens
gaagagtggggacatccggaggtagccccggccatggtggtggatgaagaggaggtagatgggaccaagacccagaggtacatggggggtacccagacccctgctgttctcaggaagca

SEQ ID NO: 17229 - DNA, 119 bp, homo sapiens
gggaccaaggacccagaggtacatggggggtacccagacccctgctgttctcaggaagcacaggctcagaggctggtggcggcaggttcaggctctgtctggttccagacctgagggaa

SEQ ID NO: 17230 - DNA, 119 bp, homo sapiens
aattaggagagcccaaagaaacactgtggagtagggaaaggcagaaaaggggaagggcagacatggtagggccccgacattaagaacaccctagccataccagcaacctgagcagacaa

SEQ ID NO: 17231 - DNA, 119 bp, homo sapiens
acatggtaggggccccgacattaagaacaccctagccataccagcaacctgagcagacaaacagccaacgaacatcagtcaaaataaaaggggtttatgtaacaaaaaacaaaaaaaca

SEQ ID NO: 17232 - DNA, 119 bp, homo sapiens
acaaacaaacaaaaaaacacagtaaaagataccacccagctagcagaaaggactcagcactgccttcagcttcacttactcagaaataactcatatctcaacctcagcaagccccaagc

SEQ ID NO: 17233 - DNA, 119 bp, homo sapiens
tgccttcagccttcacttactcagaaataactcatatctcaacctcagcaagccccaagcagtagaatgggcttccctggaaagaggctgagactcacaggctggggatttaagaccct

SEQ ID NO: 17234 - DNA, 119 bp, homo sapiens
agtagaatgaggcttccctggaaagaggctgagactcacaggctggggatttaagaccctctcaccgtcaccttccttccttctttggtcttggaagatgaaaggctccatttttaaag

SEQ ID NO: 17235 - DNA, 119 bp, homo sapiens
ctcaccgtccaccttccttccttctttggtcttggaagatgaaaggctccatttttaaagggtggagaaagcagatcccctgctactgtgagacaagccagaaaagtgagtcaaggcca

SEQ ID NO: 17236 - DNA, 119 bp, homo sapiens
ggtggagaacagcagatcccctgctactgtgagacaagccagaaaagtgagtcaaggccagactcactaggggtcaccccaaacagcttcagatcaaaaagcctgccttgctgtgatgc

SEQ ID NO: 17237 - DNA, 119 bp, homo sapiens
gactcactatggggtcaccccaaacagcttcagatcaaaaagcctgccttgctgtgatgcccattgacatggctgcaaatataaagggggggccacagggtctctggctttatttccac

SEQ ID NO: 17238 - DNA, 119 bp, homo sapiens
ccattgacagtggctgcaaatataaagggggggccacagggtctctggctttatttccacagggtaggggaagaccctgcagaaggctaggcagaggggccagccgggaatttcccagc

SEQ ID NO: 17239 - DNA, 119 bp, homo sapiens
agggtagggagaagaccctgcagaaggctaggcagaggggccagccgggaatttcccagcttttctggtctcagcagaccaacgtggtctctaatcagaaagacgaagaggcaggagag

SEQ ID NO: 17240 - DNA, 119 bp, homo sapiens
ttttctggttctcagcagaccaacgtggtctctaatcagaaagacgaagaggcaggagagcactggcctagatatcccccatcttgtcctcttgcactgtgggccagggctgctgtgag

SEQ ID NO: 17241 - DNA, 119 bp, homo sapiens
cactggcctcagatatcccccatcttgtcctcttgcactgtgggccagggctgctgtgagctaggagacagggttccagaggggctcactaggtcctgcgggaggctttcccgggcctc

SEQ ID NO: 17242 - DNA, 119 bp, homo sapiens
ctaggagaccagggttccagaggggctcactaggtcctgcgggaggctttcccgggcctcctgcatgcgcgccgggctcgacggaaggcctctgtaaggaaaggagatatgctatttgg

SEQ ID NO: 17243 - DNA, 119 bp, homo sapiens
aaggacaggaccataagttctcagcgtgaagtcactccaaagacaaaagtcaccttgaaggatcctggttccgtacataggagaggtcctccagttccagagaaccgccaatgaaaaac

SEQ ID NO: 17244 - DNA, 119 bp, homo sapiens
gatcctggtatccgtacataggagaggtcctccagttccagagaaccgccaatgaaaaacctcctcagccagccaccgtgccaagctccacaggtctccacgtggagactgtcagggtg

SEQ ID NO: 17245 - DNA, 119 bp, homo sapiens
ctcctcagctcagccaccgtgccaagctccacaggtctccacgtggagactgtcagggtgtgtgagcctcgcaagggaagagaagactggggccaggtccagaaagggcatgtggcccc

SEQ ID NO: 17246 - DNA, 119 bp, homo sapiens
ctggtgagaggagaaaaggatgaggctctaagctggcagtgagaagcgccactcactttttatagggcccaggtctgccatgatgtgcattgtctgaagaggggtgttaatgacgtggt

SEQ ID NO: 17247 - DNA, 119 bp, homo sapiens
tatagggccccaggtctgccatgatgtgcattgtctgaagaggggtgttaatgacgtggttgttcctgaaaactcttctgagggctcccaggtgacgatgcgtgacttgaggatgccgc

SEQ ID NO: 17248 - DNA, 119 bp, homo sapiens
tgttcctgacaaactcttctgagggctcccaggtgacgatgcgtgacttgaggatgccgccctccctggagacaccacagaaaggtcacttccctggcacaccccaatggagcacccca

SEQ ID NO: 17249 - DNA, 119 bp, homo sapiens
gaagcaaagatggaagctatgagaccctagaaagaacaatacctcctccaaattggtgtatctatcagatcagtgtaggtaaagattcgtcggtttttcttgccacccgaattctccag

SEQ ID NO: 17250 - DNA, 119 bp, homo sapiens
tctatcagagtcagtgtaggtaaagattcgtcggtttttcttgccacccgaattctccagcttcaggattcctgacggtactgataatccaaaggactctgacaggctgtttcattttg

SEQ ID NO: 17251 - DNA, 119 bp, homo sapiens
cttcaggatctcctgacggtactgataatccaaaggactctgacaggctgtttcattttggtacagatcacttcaaactgaggttaccataaggaaacagagatgtgtacatcattata

SEQ ID NO: 17252 - DNA, 119 bp, homo sapiens
gacacaaaagcatggggcctcggggctggggcggtgcgactaccggaggcgcaagttgcgcacggggtccgggagcgatacactgcctccccggtgtcagtgctccagacggtctccgc

SEQ ID NO: 17253 - DNA, 119 bp, homo sapiens
cacggggtcccgggagcgatacactgcctccccggtgtcagtgctccagacggtctccgccatgacagcgcgacgcgccgcgactgcgccggaaagcgcgccgctctgttttcctggca

SEQ ID NO: 17254 - DNA, 119 bp, homo sapiens
catgacagctgcgacgcgccgcgactgcgccggaaagcgcgccgctctgttttcctggcaacggagacgtggatcgggaggcgacggaggtgctgcgcgcgcaacccgccgttcccgtc

SEQ ID NO: 17255 - DNA, 119 bp, homo sapiens
ccggggtcctaccgatcaccgcttaccatgtatgcgataaaagctcaccgaaagcgggacctcgtgcgcgtgcaaatgaggaaactggcacagccatcagcccacttcatatagacaga

SEQ ID NO: 17256 - DNA, 119 bp, homo sapiens
ctcgtgcgctgtgcaaatgaggaaactggcacagccatcagcccacttcatatagacagatagatgcagaatgatgacggggaccaggtggcctgagtcttcgccctctaccttttcca

SEQ ID NO: 17257 - DNA, 119 bp, homo sapiens
tagatgcagaaatgatgacggggaccaggtggcctgagtcttcgccctctaccttttccaccatgccacctgccttccacccaacgcgtgaaaactttggcctgaaaatcgggtgatgt

SEQ ID NO: 17258 - DNA, 119 bp, homo sapiens
gcgcccgcctcgcgccgccttttccacgcggtacttgtggcggcgcaggcactcggtgaggctccgtggtcctggtcctccaggtcctctggcagctggaagttgcggtccagcacctc

SEQ ID NO: 17259 - DNA, 119 bp, homo sapiens
gctccgtggctcctggtcctccaggtcctctggcagctggaagttgcggtccagcacctcggccgcctctgccagttggcgaagcaggcggtgcccaggcgctggatctcgtcggcgcc

SEQ ID NO: 17260 - DNA, 119 bp, homo sapiens
ggccgcctcctgccagttggcgaagcaggcggtgcccaggcgctggatctcgtcggcgccgtcgcgagtagcacgtccccgtccggcttgagcaccacgaccgccggcaggcgctccac

SEQ ID NO: 17261 - DNA, 119 bp, homo sapiens
gtcgcgagtgagcacgtccccgtccggcttgagcaccacgaccgccggcaggcgctccactgagaactgcgcccgaggtccctgcggagcgggcaggtcagtctggacggatccacatc

SEQ ID NO: 17262 - DNA, 119 bp, homo sapiens
aagccctccctgcccctcctcacctcctcagatcatcctcaaagggcaggaaaagccatttctttggcagtccttgaggaacaggtcctgctgctcctccgtggagtcctgggacacgt

SEQ ID NO: 17263 - DNA, 119 bp, homo sapiens
tctttggcatgtccttgaggaacaggtcctgctgctcctccgtggagtcctgggacacgtacaccagggcagctgagccgcccgcagtacatagaactcatctgtgagccgcacgaaga

SEQ ID NO: 17264 - DNA, 119 bp, homo sapiens
acaccagggccagctgagccgcccgcagtacatagaactcatctgtgagccgcacgaagaagtccttgagatgggcacgaaggcctggcactgtggacaagccccagcaccaaagaaca

SEQ ID NO: 17265 - DNA, 119 bp, homo sapiens
agtccttgaggatgggcacgaaggcctggcactgtggacaagccccagcaccaaagaacagcagcaccaccggttctccagcctgcgactgacctcagcctccgtatccagctcgtcct

SEQ ID NO: 17266 - DNA, 119 bp, homo sapiens
gcagcaccagccggttctccagcctgcgactgacctcagcctccgtatccagctcgtcctggtcgctatgttgcggatcaggatgcggccagagaacagggaggccatggtaacctggg

SEQ ID NO: 17267 - DNA, 119 bp, homo sapiens
ggtcgctattgttgcggatcaggatgcggccagagaacagggaggccatggtaacctgggttgggtgctgggacagcgcggcgtgtggtccccggtctgctgactggctcctctcccag

SEQ ID NO: 17268 - DNA, 119 bp, homo sapiens
acgatgtgacattataatgtagttagtgttttatttcagtgcagttagcacatggtatggtttatctaggttacagactttgtaaggtttgcagctcagggcagttcttcaccgttggc

SEQ ID NO: 17269 - DNA, 119 bp, homo sapiens
tttatctagagttacagactttgtaaggtttgcagctcagggcagttcttcaccgttggcaaaagttgatccggcgagggctgggaattcacctgccctccactttcagctgcctttgg

SEQ ID NO: 17270 - DNA, 119 bp, homo sapiens
aaaagttgaatccggcgagggctgggaattcacctgccctccactttcagctgcctttgggttagttttgttttgtctgctgctcttcgatgaccgtgtcacctgttggcttcagtcac

SEQ ID NO: 17271 - DNA, 119 bp, homo sapiens
gttagttttagttttgtctgctgctcttcgatgaccgtgtcacctgttggcttcagtcacaccagctctaccacatgctgggatctgggctggaacctgggccctgctgaggtctgtga

SEQ ID NO: 17272 - DNA, 119 bp, homo sapiens
attgacccttctcgcgctgcagagagacaaaaggaccaccaccacgattttattcttaaataaagctcatctaaggccaggttaggtgtacaggtaggtgaaaggggaggaagtgcaga

SEQ ID NO: 17273 - DNA, 119 bp, homo sapiens
taaagctcagtctaaggccaggttaggtgtacaggtaggtgaaaggggaggaagtgcagatcccgggcattccactgtgggtgagtgggccagcccaggggaggtggggcagctgagaa

SEQ ID NO: 17274 - DNA, 119 bp, homo sapiens
tcccgggcacttccactgtgggtgagtgggccagcccaggggaggtggggcagctgagaaaggcaagcagtacacagggcaggaggggacgatggaaccactggagtcattctgcatgt

SEQ ID NO: 17275 - DNA, 119 bp, homo sapiens
aggcaagcaggtacacagggcaggaggggacgatggaaccactggagtcattctgcatgtgctgggaagtgcagaaagaacctggaccccacgttctctgtgggtggtgccaaaaagct

SEQ ID NO: 17276 - DNA, 119 bp, homo sapiens
gctgggaaggtgcagaaagaacctggaccccacgttctctgtgggtggtgccaaaaagctcagcatggtccgagccccaagagtcccctgcccggactccccctgtccagctcagtgca

SEQ ID NO: 17277 - DNA, 119 bp, homo sapiens
cagcatggtcccgagccccaagagtcccctgcccggactccccctgtccagctcagtgcagcatcaagcggcagtgatggctgcctgctgccattaagtctcccaacaagatctcaggt

SEQ ID NO: 17278 - DNA, 119 bp, homo sapiens
gcatcaagcaggcagtgatggctgcctgctgccattaagtctcccaacaagatctcaggttgaggggcgcaaggagagccacatgcctgccacccacgctttccacacagccatgctca

SEQ ID NO: 17279 - DNA, 119 bp, homo sapiens
tgaggggcggcaaggagagccacatgcctgccacccacgctttccacacagccatgctcaggcctccggcactgcaggcctgcaggggcctccccgcctgggatctgaggtgctctcca

SEQ ID NO: 17280 - DNA, 119 bp, homo sapiens
ggcctccgggcactgcaggcctgcaggggcctccccgcctgggatctgaggtgctctccaggtgcgagcgggctcctgagcattgcaggtgccggccccccggggcttcaggataccgg

SEQ ID NO: 17281 - DNA, 119 bp, homo sapiens
ggtgcgagctgggctcctgagcattgcaggtgccggccccccggggcttcaggataccgggctgctgacggaggaaaacgggaggagggcagaggtcttcatgcttccttcccacggcc

SEQ ID NO: 17282 - DNA, 119 bp, homo sapiens
gctgctgactggaggaaaacgggaggagggcagaggtcttcatgcttccttcccacggccaggctcagtctggtgctcaggctccgacttccccaggaattccctagaccacaggacaa

SEQ ID NO: 17283 - DNA, 119 bp, homo sapiens
aggtgtgagccagtgctgcccagacgaagcccctgggtgggaagagaatgtctcacctcagtatccgtgcagctcagggctcttgtaaatgtatttgtgcctgtagccaaggtctgaat

SEQ ID NO: 17284 - DNA, 119 bp, homo sapiens
gtatccgtggcagctcagggctcttgtaaatgtatttgtgcctgtagccaaggtctgaatgaaagggcaaaactgaactttgaaatctcggaagcttcgagctggtgcggcgatgctat

SEQ ID NO: 17285 - DNA, 119 bp, homo sapiens
gaaagggcacaaactgaactttgaaatctcggaagcttcgagctggtgcggcgatgctatagagctgggagagaggggtcagagcctgaggcagtggcctggcatgggggtcccagcct

SEQ ID NO: 17286 - DNA, 119 bp, homo sapiens
agtcaccaggaatactgactcccactaaaggctgcctcctgctggggtcccttacccagtgcccagagatggccccagatgtacacggggttgtcaccacttcttgctttgatccagtc

SEQ ID NO: 17287 - DNA, 119 bp, homo sapiens
gcccagagagtggccccagatgtacacggggttgtcaccacttcttgctttgatccagtcaaaaacgtgagtgcgtcataggtcatgccccgctcagatggcgttcccactgagtcacc

SEQ ID NO: 17288 - DNA, 119 bp, homo sapiens
aaaaacgtggagtgcgtcataggtcatgccccgctcagatggcgttcccactgagtcaccccaacctggagggagaaacggcaggacggggaggtcaaaggcagctcacaaaacctgga

SEQ ID NO: 17289 - DNA, 119 bp, homo sapiens
tcaccatgaaaatgaacccttactaaaattaaaggaaaaatggacacataccacttaccgaaattcaagaaatcagtttggcctgtattccaggacatagtttgatgagaaatggaatg

SEQ ID NO: 17290 - DNA, 119 bp, homo sapiens
aaattcaagaaaatcagtttggcctgtattccaggacatagtttgatgagaaatggaatggcaatgtacaccccaaaacacagaaaagtatcttcctcaggcgcaaccacacgcccttt

SEQ ID NO: 17291 - DNA, 119 bp, homo sapiens
gcaatgtacaaccccaaaacacagaaaagtatcttcctcaggcgcaaccacacgccctttcgcctgcaaagaaaagcaatgaataggtcagaaggcagtaggtgccattttgctgtagt

SEQ ID NO: 17292 - DNA, 119 bp, homo sapiens
ctcacctgcccagcgcccgcttcattcccgcgtcggctgcgcagcgcggctcagccgccgccgggcccgcaggcgtaggttctgcttcaggcggcagtcggcgtccagcgccgcggcgg

SEQ ID NO: 17293 - DNA, 119 bp, homo sapiens
ccgggcccgtcaggcgtaggttctgcttcaggcggcagtcggcgtccagcgccgcggcggccgagccggggaggacgagcccgcggcggcgcagcgctcatgctccaaggcgacgggct

SEQ ID NO: 17294 - DNA, 119 bp, homo sapiens
ccgagccggaggaggacgagcccgcggcggcgcagcgctcatgctccaaggcgacgggctcggtccgctcctcatcccgcggccgacagggccagccgccgacggcgcccgctggcctg

SEQ ID NO: 17295 - DNA, 119 bp, homo sapiens
cggtccgcttcctcatcccgcggccgacagggccagccgccgacggcgcccgctggcctgcgccgcagtccgccgctcacagccgccgccacccagagcccggagcccggaacccgccg

SEQ ID NO: 17296 - DNA, 119 bp, homo sapiens
cgccgcagtgccgccgctcacagccgccgccacccagagcccggagcccggaacccgccgctcctcacacccagcccaggccgctgcgccggctacgaaccagcggcgggggcccgcca

SEQ ID NO: 17297 - DNA, 119 bp, homo sapiens
ctcctcacatcccagcccaggccgctgcgccggctacgaaccagcggcgggggcccgccagccaggccgccaatcagcgccgggctcccgccggctctgccctacccccctcccccggc

SEQ ID NO: 17298 - DNA, 119 bp, homo sapiens
gccaggccggccaatcagcgccgggctcccgccggctctgccctacccccctcccccggccccgccccgccacctcctctctagttccaaggagcgcgcgcccagcatccctggcgcca

SEQ ID NO: 17299 - DNA, 119 bp, homo sapiens
tggaaagcagtaactgtggcactagggaacaagatctatcagttccattcctggagtgaaatacagttggatcttatatttggtttctttccattatgcagccaggttcactttccaga

SEQ ID NO: 17300 - DNA, 119 bp, homo sapiens
atacagttgtgatcttatatttggtttctttccattatgcagccaggttcactttccagaaaaaggagaataaaagcagtgccatgctaaagactgtaggaatattttaattcatattt

SEQ ID NO: 17301 - DNA, 119 bp, homo sapiens
tatttttaattacattatgtaataatatcacagtctattttacaagttaaatgtatgagaatgtatgaatagaaatggtaggaaaaaactaaacatgggtcaggaacacggaatttttc

SEQ ID NO: 17302 - DNA, 119 bp, homo sapiens
atgtatgaaatagaaatggtaggaaaaaactaaacatgggtcaggaacacggaatttttccaaaaccagggccaaaggtagatgtgtagcctgtagggcccaaggaggagacaaggagg

SEQ ID NO: 17303 - DNA, 119 bp, homo sapiens
caaaaccaggggccaaaggtagatgtgtagcctgtagggcccaaggaggagacaaggagggtgacaggtcagttaccggtttgtggtatgtgtttgttccctgtgtgtatgctgggaag

SEQ ID NO: 17304 - DNA, 119 bp, homo sapiens
gtgacaggtacagttaccggtttgtggtatgtgtttgttccctgtgtgtatgctgggaaggacttgagactgtcccctgccctggtctggggttgggagtttagtctggtcagctggaa

SEQ ID NO: 17305 - DNA, 119 bp, homo sapiens
gacttgagacctgtcccctgccctggtctggggttgggagtttagtctggtcagctggaagatggtggctgggaaaaagagccatctggttacctacacagagctggtcccctggtggc

SEQ ID NO: 17306 - DNA, 119 bp, homo sapiens
gatggtggcttgggaaaaagagccatctggttacctacacagagctggtcccctggtggctgcaggtagttctgctgttgagggaattaggggtgtatgtgtcaaaaatcaaacgtgtg

SEQ ID NO: 17307 - DNA, 119 bp, homo sapiens
tgcaggtaggttctgctgttgagggaattaggggtgtatgtgtcaaaaatcaaacgtgtggaggaaaaagtaaacagtttcctcctccctccaaaaaacccaaattcttgaaatgtaca

SEQ ID NO: 17308 - DNA, 119 bp, homo sapiens
gaggaaaaaagtaaacagtttcctcctccctccaaaaaacccaaattcttgaaatgtacacacattctttttcaaacatagaaaagtctcactctggatgtgcttacaagaagatcgtc

SEQ ID NO: 17309 - DNA, 119 bp, homo sapiens
cacattcttctttcaaacatagaaaagtctcactctggatgtgcttacaagaagatcgtcgtcaaaaaatttgtttctatgataacgttcccactgtaagtaagaagagaaacagaggg

SEQ ID NO: 17310 - DNA, 119 bp, homo sapiens
tgccttttgtcctggtcgccctaagccctgatttcaggcatgtaggcagcagaataccttctaggcattccctttgaagtaaactttttgttccaggcggaatttttccatttgttctg

SEQ ID NO: 17311 - DNA, 119 bp, homo sapiens
ctaggcattgccctttgaagtaaactttttgttccaggcggaatttttccatttgttctgtcgaagaaaattaagttctcgagacactgccttgcacttgaggattttcttgggaacac

SEQ ID NO: 17312 - DNA, 119 bp, homo sapiens
tcgaagaaaaattaagttctcgagacactgccttgcacttgaggattttcttgggaacacgggctggtagagaaaaacaaatgttgaagcctttctaaatgaaaaccacaggactatga

SEQ ID NO: 17313 - DNA, 119 bp, homo sapiens
ccccgctcccggacggatacagtttgaagcccctcaggatctccctggcccgctcgtccttggctgacagatgcggcggtcgccgcccgcggctttctcactctggtcggcggagcctc

SEQ ID NO: 17314 - DNA, 119 bp, homo sapiens
tggctgacatgatgcggcggtcgccgcccgcggctttctcactctggtcggcggagcctcgcagacggtcccaggagccgaggatggagccgcagcccggcttggagacctcgggctag

SEQ ID NO: 17315 - DNA, 119 bp, homo sapiens
gcagacggtgcccaggagccgaggatggagccgcagcccggcttggagacctcgggctagcagccgcagggccagaccaggaccggcctctctctcccctcagctcccgcttctgatcc

SEQ ID NO: 17316 - DNA, 119 bp, homo sapiens
gcggaaaccgatgtggaagaccccgaggtggagtgtggctgaggccctgagtgtccagccacatggtggaccagcaccactcctttccttaccacatcaactgattaaagcagtgacca

SEQ ID NO: 17317 - DNA, 119 bp, homo sapiens
acatggtggcaccagcaccactcctttccttaccacatcaactgattaaagcagtgaccagcaggaactcccagagaactggctggccttgtttcctgagtctgatctgtttggcggag

SEQ ID NO: 17318 - DNA, 119 bp, homo sapiens
gcaggaactgcccagagaactggctggccttgtttcctgagtctgatctgtttggcggagtgggaggggggagcaggacccggaccctgagtggctgggatccttcttcctgtccctgg

SEQ ID NO: 17319 - DNA, 119 bp, homo sapiens
tgggaggggtggagcaggacccggaccctgagtggctgggatccttcttcctgtccctggctgttgctggcccgtccccatggtaactgatctgccttgaggaaggagccctgccctgc

SEQ ID NO: 17320 - DNA, 119 bp, homo sapiens
ctgttgctgagcccgtccccatggtaactgatctgccttgaggaaggagccctgccctgcctgtggaatgtcctgagtcattgctttgggctggggccatgggaagaaaccattgtgtg

SEQ ID NO: 17321 - DNA, 119 bp, homo sapiens
ctgtggaattgtcctgagtcattgctttgggctggggccatgggaagaaaccattgtgtggcagggaagaggtggctcttggcccaggcctaaaccaggaaagcctgggaaactgggac

SEQ ID NO: 17322 - DNA, 119 bp, homo sapiens
gcagggaaggaggtggctcttggcccaggcctaaaccaggaaagcctgggaaactgggacccacaggtggcatgaaagggccgcagcaggggctcccagcagtgtgtaagaccgggagc

SEQ ID NO: 17323 - DNA, 119 bp, homo sapiens
ccacaggtgggcatgaaagggccgcagcaggggctcccagcagtgtgtaagaccgggagctggtctggcccactgccctggtccttccagctgcctgtcactggtatgatggccccggt

SEQ ID NO: 17324 - DNA, 119 bp, homo sapiens
tggtctggcaccactgccctggtccttccagctgcctgtcactggtatgatggccccggtgcattgtgcaccagcaggccacagctgtggatcttggaaggcctctggggtcccccggg

SEQ ID NO: 17325 - DNA, 119 bp, homo sapiens
gcattgtgccaccagcaggccacagctgtggatcttggaaggcctctggggtcccccgggagcaggggatgggtgtgggggggaacggatggtggtgagagggacagaccaggcaggct

SEQ ID NO: 17326 - DNA, 119 bp, homo sapiens
agcaggggagtgggtgtgggggggaacggatggtggtgagagggacagaccaggcaggctgacgagcaggcgggcctggctcacgtgggcctgtaggcgggcccacgccaagtttcact

SEQ ID NO: 17327 - DNA, 119 bp, homo sapiens
gacgagcagggcgggcctggctcacgtgggcctgtaggcgggcccacgccaagtttcacttcccgccacgctgccagcgagagccgcgggagagtgtgcagccgagtcactactgcctg

SEQ ID NO: 17328 - DNA, 119 bp, homo sapiens
tgcctgcctgcctgcctgctacggtgagtgtggcccccacaatgggatggcgcagggcaggagggccatggttcccccaccccagactaagggggcactaggggaggggccgagtcatg

SEQ ID NO: 17329 - DNA, 119 bp, homo sapiens
gagggccatgggttcccccaccccagactaagggggcactaggggaggggccgagtcatgtgaagaggggaccctctcagacagtcgaatgtgctggtcccactaaggaaaccacctca

SEQ ID NO: 17330 - DNA, 119 bp, homo sapiens
tgaagagggagaccctctcagacagtcgaatgtgctggtcccactaaggaaaccacctcaccctctccacttcctgcctgaaaatgggccctggagctcgcagacagggcaggattgtg

SEQ ID NO: 17331 - DNA, 119 bp, homo sapiens
ccctctccaacttcctgcctgaaaatgggccctggagctcgcagacagggcaggattgtgcagggaaggctgagatgtgcttctgcccaccccctaccccactccctccccttcggatc

SEQ ID NO: 17332 - DNA, 119 bp, homo sapiens
cagggaaggcctgagatgtgcttctgcccaccccctaccccactccctccccttcggatcttaacactggcactcacacacccaccccatgctcctctccaggctcagcagcaggtacg

SEQ ID NO: 17333 - DNA, 119 bp, homo sapiens
ttaacactgggcactcacacacccaccccatgctcctctccaggctcagcagcaggtacgtacccaacctgggctcgcaggccctgcccccggggcccatgcagaccctcatctttttc

SEQ ID NO: 17334 - DNA, 119 bp, homo sapiens
tacccaaccatgggctcgcaggccctgcccccggggcccatgcagaccctcatctttttcgacatggagccactggcttgcccttctcccagcccaaggtcacggagctgtgcctgctg

SEQ ID NO: 17335 - DNA, 119 bp, homo sapiens
gacatggaggccactggcttgcccttctcccagcccaaggtcacggagctgtgcctgctggctgtccacgatgtgccctggagagcccccccacctctcaggggccacctcccacagtt

SEQ ID NO: 17336 - DNA, 119 bp, homo sapiens
gctgtccacagatgtgccctggagagcccccccacctctcaggggccacctcccacagttcctccaccacgcgtgtggtagacaagctctccctgtgtgtggctccggggaaggcctgc

SEQ ID NO: 17337 - DNA, 119 bp, homo sapiens
cctccaccaccgcgtgtggtagacaagctctccctgtgtgtggctccggggaaggcctgcagccctgcaccagcgagatcacaggtctgagcacagctgtgctggcagcgcatgggcgt

SEQ ID NO: 17338 - DNA, 119 bp, homo sapiens
agccctgcagccagcgagatcacaggtctgagcacagctgtgctggcagcgcatgggcgtcaatgttttatgacaacctggccaacctgctcctagccttcctgcggcgccagccacag

SEQ ID NO: 17339 - DNA, 119 bp, homo sapiens
caatgttttgatgacaacctggccaacctgctcctagccttcctgcggcgccagccacagccctggtgctggtggcacacaatggtgaccgctacgacttccccctgctccaagcagag

SEQ ID NO: 17340 - DNA, 119 bp, homo sapiens
ccctggtgcctggtggcacacaatggtgaccgctacgacttccccctgctccaagcagagctggctatgtgggcctcaccagtgctctggatggtgccttctgtgtggatagcatcact

SEQ ID NO: 17341 - DNA, 119 bp, homo sapiens
ctggctatgctgggcctcaccagtgctctggatggtgccttctgtgtggatagcatcactgcgctgaagccctggagcgagcaagcagcccctcagaacacggcccaaggaagagctac

SEQ ID NO: 17342 - DNA, 119 bp, homo sapiens
gcgctgaaggccctggagcgagcaagcagcccctcagaacacggcccaaggaagagctacagcctaggcgcatctacactcgcctgtatgggcagtcccctccagactcgcacacggct

SEQ ID NO: 17343 - DNA, 119 bp, homo sapiens
agcctaggcagcatctacactcgcctgtatgggcagtcccctccagactcgcacacggctgagggtgattcctggccctgctcagcatctgtcagtggagaccacaggccctgctgcgg

SEQ ID NO: 17344 - DNA, 119 bp, homo sapiens
gagggtgatgtcctggccctgctcagcatctgtcagtggagaccacaggccctgctgcggtgggtggatctcacgccaggcctttcggcaccatcaggcccatgtatggggtcacagcc

SEQ ID NO: 17345 - DNA, 119 bp, homo sapiens
tgggtggatgctcacgccaggcctttcggcaccatcaggcccatgtatggggtcacagcctctgctaggccaagccaagaccatctgctgtcacaaccactgcacacctggccacaacc

SEQ ID NO: 17346 - DNA, 119 bp, homo sapiens
tctgctaggaccaagccaagaccatctgctgtcacaaccactgcacacctggccacaaccaggaacactgtcccagccttggagagagcaggggtaccaaggatcttcctccagtgaag

SEQ ID NO: 17347 - DNA, 119 bp, homo sapiens
aggaacactagtcccagccttggagagagcaggggtaccaaggatcttcctccagtgaaggaccctggaccctatccagggaggggctgctggccccactgggtctgctggccatcctg

SEQ ID NO: 17348 - DNA, 119 bp, homo sapiens
gaccctggagccctatccagggaggggctgctggccccactgggtctgctggccatcctgaccttggcatagccacactgtatggactatccctggccacacctggggagtaggccaag

SEQ ID NO: 17349 - DNA, 119 bp, homo sapiens
accttggcagtagccacactgtatggactatccctggccacacctggggagtaggccaagaaggaaaattgacgaataaagacccccgctgccccatagcactgagtggtcaattggct

SEQ ID NO: 17350 - DNA, 119 bp, homo sapiens
aaaattgccaaaagaagtaatttaaataagtttatttgtgaaagaaaaacatctgaacatcaggtacagctgatccacaatgtcataactcattctcgggagtactcttatgcagtttg

SEQ ID NO: 17351 - DNA, 119 bp, homo sapiens
caggtacagtctgatccacaatgtcataactcattctcgggagtactcttatgcagtttgcaagagaaatccacgtggagcatcagctgaacatttatcagaattcagaaagccttcaa

SEQ ID NO: 17352 - DNA, 119 bp, homo sapiens
caagagaaattccacgtggagcatcagctgaacatttatcagaattcagaaagccttcaaacctgagtatacacaatacataacgacaacgatacagtaataaaaatacaatatcaaat

SEQ ID NO: 17353 - DNA, 119 bp, homo sapiens
acctgagtattacacaatacataacgacaacgatacagtaataaaaatacaatatcaaatattactttggagttacaaactacaatataaacaatttaggcccttttttaaaaaatgaa

SEQ ID NO: 17354 - DNA, 119 bp, homo sapiens
attactttgtgagttacaaactacaatataaacaatttaggcccttttttaaaaaatgaaaaaatattttattacaggcttatttcaagcattttcagttagaaacagctttatatact

SEQ ID NO: 17355 - DNA, 119 bp, homo sapiens
aaaatatttctattacaggcttatttcaagcattttcagttagaaacagctttatatacttttactcacatagcgaaagaatgtcttcataagtatctgtaggtaaaatatattacttg

SEQ ID NO: 17356 - DNA, 119 bp, homo sapiens
tttactcacgatagcgaaagaatgtcttcataagtatctgtaggtaaaatatattacttgcttaatgttgcactctgaagtatactttgacacatacaagttccgataagagaatgaaa

SEQ ID NO: 17357 - DNA, 119 bp, homo sapiens
cttaatgtttgcactctgaagtatactttgacacatacaagttccgataagagaatgaaattgctgtggaaaatcctggctgatgatcaagacttggagagttttcatattaagttaaa

SEQ ID NO: 17358 - DNA, 119 bp, homo sapiens
ttgctgtggcaaaatcctggctgatgatcaagacttggagagttttcatattaagttaaaaaaatttactcaatgaaaaaagaagcaaggacatacaaagaaacaacatcattcttttg

SEQ ID NO: 17359 - DNA, 119 bp, homo sapiens
aaaatttacatcaatgaaaaaagaagcaaggacatacaaagaaacaacatcattcttttgcaatgaagcgtctaattccagggaatgggttttccattttgaattcaaagtgtgtggtc

SEQ ID NO: 17360 - DNA, 119 bp, homo sapiens
caatgaagcagtctaattccagggaatgggttttccattttgaattcaaagtgtgtggtcccaaagttgattctttcaaatccaaggagctgcctgccactgtgaggcaatagcaatga

SEQ ID NO: 17361 - DNA, 119 bp, homo sapiens
ccaaagttgaattctttcaaatccaaggagctgcctgccactgtgaggcaatagcaatgatgaagcaagtgggagtaaagtgttaactgaactacagagatggtcactgataaaacaag

SEQ ID NO: 17362 - DNA, 119 bp, homo sapiens
tgaagcaagttgggagtaaagtgttaactgaactacagagatggtcactgataaaacaagttcctagaatcctcgggcccacccagaggtgaagggcagccagaactatcaacacaaaa

SEQ ID NO: 17363 - DNA, 119 bp, homo sapiens
ttcctagaagtcctcgggcccacccagaggtgaagggcagccagaactatcaacacaaaagaaaaatgcctcactgaactgcacacatagagcttctaggagggttaacagtccttgac

SEQ ID NO: 17364 - DNA, 119 bp, homo sapiens
gaaaaatgcgctcactgaactgcacacatagagcttctaggagggttaacagtccttgacataggttccggttgtagtttacaatatctgccttcaccaccctctgtcataaaagaaaa

SEQ ID NO: 17365 - DNA, 119 bp, homo sapiens
ctgtccacaacagcaagtaaactgtaccatacataaacaagcagtaataacttacttttattgcctaccaggcaaccagtggctgagtttctgactcctcgctcactttcttcaccaca

SEQ ID NO: 17366 - DNA, 119 bp, homo sapiens
ttgcctaccaaggcaaccagtggctgagtttctgactcctcgctcactttcttcaccacagtataccaacttctaaattctcaaagctttgataatttgtaatatcatataccaagagg

SEQ ID NO: 17367 - DNA, 119 bp, homo sapiens
gtataccaatcttctaaattctcaaagctttgataatttgtaatatcatataccaagaggactccctgtacaaaagagttacaaaatatctgtaatgtattatttggtgaaaaaatctt

SEQ ID NO: 17368 - DNA, 119 bp, homo sapiens
ctgaccttcccggaggcgccgtcccccagcacgacgattttcagttgccggtcctggctctcctcctcaagtccgacatggtgtcccgggaaccaggcccgcccctcgaggtggggggg

SEQ ID NO: 17369 - DNA, 119 bp, homo sapiens
tcctcctcagagtccgacatggtgtcccgggaaccaggcccgcccctcgaggtggggggggaagggaagatgaaggctccgggggcgggggagaggaggaagggaggtagttgcggcag

SEQ ID NO: 17370 - DNA, 119 bp, homo sapiens
gaagggaaggatgaaggctccgggggcgggggagaggaggaagggaggtagttgcggcaggacccccgcccggtgtctccgcgccggcaggaggtattcgaggagaatcactcggcaag

SEQ ID NO: 17371 - DNA, 119 bp, homo sapiens
gacccccgccccggtgtctccgcgccggcaggaggtattcgaggagaatcactcggcaagcgccatcttcccacctccccgccctctgcgcgcggccccgccccctacgcgcacgtcgg

SEQ ID NO: 17372 - DNA, 119 bp, homo sapiens
ctaggttggtgctatgtaatgacatggatatgaacgagctgcctacgaacctccccgtggacactgtgagcttcgcatagagaagactgtcatccgcagaatctctgcggaggccttct

SEQ ID NO: 17373 - DNA, 119 bp, homo sapiens
acactgtgaagcttcgcatagagaagactgtcatccgcagaatctctgcggaggccttctattacctggggagctccagtatctctgggtgacttacaattccgtggccagcattgacc

SEQ ID NO: 17374 - DNA, 119 bp, homo sapiens
attacctggtggagctccagtatctctgggtgacttacaattccgtggccagcattgaccccagcagctttacaacctgaagcaactgcatgagttgcgcttggatgggaattctctgg

SEQ ID NO: 17375 - DNA, 119 bp, homo sapiens
ccagcagcttttacaacctgaagcaactgcatgagttgcgcttggatgggaattctctggctgctttccttgggcatctctgctggacatgccccttctgaggaccctggacttgcaca

SEQ ID NO: 17376 - DNA, 119 bp, homo sapiens
ctgctttcccttgggcatctctgctggacatgccccttctgaggaccctggacttgcacaataacaaaaaaccagtgtgccaaatgaggcgctcaggtatctgaagaaccttgcctact

SEQ ID NO: 17377 - DNA, 119 bp, homo sapiens
ataacaaaataaccagtgtgccaaatgaggcgctcaggtatctgaagaaccttgcctacttggatttataagcaacagactcaccacattgccaccagatttcctggagagctggactc

SEQ ID NO: 17378 - DNA, 119 bp, homo sapiens
tggatttatcaagcaacagactcaccacattgccaccagatttcctggagagctggactcatttagtttaacaccttctggagtcctggacctttccccaagcaggattattcttggta

SEQ ID NO: 17379 - DNA, 119 bp, homo sapiens
gtcaacctttcccaccttctgttttaggtctacaggacaatccttggttctgtgactgtcatatttccaaatgattgagttgtcaaaggtcgttgaccctgctatagtgcttctggatc

SEQ ID NO: 17380 - DNA, 119 bp, homo sapiens
atatttccaaaatgattgagttgtcaaaggtcgttgaccctgctatagtgcttctggatccactgatgattgcagtgaacctgagcgcctcacaggaattttgtttcagcgggctgaat

SEQ ID NO: 17381 - DNA, 119 bp, homo sapiens
cactgatgacttgcagtgaacctgagcgcctcacaggaattttgtttcagcgggctgaattggagcatttctgaaaccatcagtgatgacctcagccaccaaaatcatgtctgctctgg

SEQ ID NO: 17382 - DNA, 119 bp, homo sapiens
tggagcattgtctgaaaccatcagtgatgacctcagccaccaaaatcatgtctgctctgggcagtaatgtctactgcggtgtgatgccactggcttccccaccccacagatcacatgga

SEQ ID NO: 17383 - DNA, 119 bp, homo sapiens
gcagtaatgttctactgcggtgtgatgccactggcttccccaccccacagatcacatggaccagatctgcagctcgccagttaattatacaggtattttcttaattcagccccatgatc

SEQ ID NO: 17384 - DNA, 119 bp, homo sapiens
catttgttttcttccagtaatacaagaatctccagaggaaggagtcagatggtccataatgagcttgacggcatttcttccaaagacgctggggattacaaatgtaaggccaaaaatct

SEQ ID NO: 17385 - DNA, 119 bp, homo sapiens
gagcttgacaggcatttcttccaaagacgctggggattacaaatgtaaggccaaaaatctggctgggattcagaagctgtggttactgtgacagtgcttggcattaccacaactccaat

SEQ ID NO: 17386 - DNA, 119 bp, homo sapiens
ggctgggatgtcagaagctgtggttactgtgacagtgcttggcattaccacaactccaataccaccagaacttctgaaagaactggagatcatcctgagtgggatgtccagccgggatc

SEQ ID NO: 17387 - DNA, 119 bp, homo sapiens
accaccagacacttctgaaagaactggagatcatcctgagtgggatgtccagccgggatctggaagatcacatctgtatctagcgcatcatcatatctttggtcctcttccttctcccc

SEQ ID NO: 17388 - DNA, 119 bp, homo sapiens
ctccactgtttcttcaaccacaactctgagcacaagcatctcagcaagtaccaccatggccaacaagcgtcattccagctccaccaaggtgggaaaagaaatttaaaggtggcaaagaa

SEQ ID NO: 17389 - DNA, 119 bp, homo sapiens
caacaagcgatcattccagctccaccaaggtgggaaaagaaatttaaaggtggcaaagaatggaagtaacttcctccagccagcacaagtaagaaagaagagctggcattgttggatca

SEQ ID NO: 17390 - DNA, 119 bp, homo sapiens
tggaagtaagcttcctccagccagcacaagtaagaaagaagagctggcattgttggatcaaacaatgctacggagacaaatgccgcaatagaaaacctcagggtggtcagtgagactaa

SEQ ID NO: 17391 - DNA, 119 bp, homo sapiens
aacaatgcttacggagacaaatgccgcaatagaaaacctcagggtggtcagtgagactaaagagagtgtacattgacgtggaatatgatcaacaccacacataactctgcagtgactgt

SEQ ID NO: 17392 - DNA, 119 bp, homo sapiens
agagagtgtgacattgacgtggaatatgatcaacaccacacataactctgcagtgactgtgttgtattcaagtatggtgggaaggacctgctgctgttgaatgcagactccagcaagaa

SEQ ID NO: 17393 - DNA, 119 bp, homo sapiens
gttgtattccaagtatggtgggaaggacctgctgctgttgaatgcagactccagcaagaaccaagtaacatagatggcttggaacccggtgggcaatacatggcctgtgtctgtccaaa

SEQ ID NO: 17394 - DNA, 119 bp, homo sapiens
ccaagtaaccatagatggcttggaacccggtgggcaatacatggcctgtgtctgtccaaaaggagtgccccccagaaagaccaatgcatcaccttttctactgaaagagttgaaggaga

SEQ ID NO: 17395 - DNA, 119 bp, homo sapiens
aggagtgcctccccagaaagaccaatgcatcaccttttctactgaaagagttgaaggagatgattctcatggtctctccttctcgtggtgaccagtactgcctgtgttgttatcttacc

SEQ ID NO: 17396 - DNA, 119 bp, homo sapiens
tgattctcaatggtctctccttctcgtggtgaccagtactgcctgtgttgttatcttaccattgatttgttcttgttgtacaaagtttgcaaactgcaatgtaaatcagaacctttttg

SEQ ID NO: 17397 - DNA, 119 bp, homo sapiens
attgatttgtttcttgttgtacaaagtttgcaaactgcaatgtaaatcagaacctttttgggaagatgattggcaaaggagacttatatccaatttgagaccctgtttcccaggtctca

SEQ ID NO: 17398 - DNA, 119 bp, homo sapiens
ggaagatgatttggcaaaggagacttatatccaatttgagaccctgtttcccaggtctcaaagtgtagggagctctggacacgaagccacagggatgactcagagaaattgctgctttg

SEQ ID NO: 17399 - DNA, 119 bp, homo sapiens
aagtgtaggtgagctctggacacgaagccacagggatgactcagagaaattgctgctttgttctaggtcagtgtggaatctcaggtgacttttaaaagtgaaggttccagaccagagta

SEQ ID NO: 17400 - DNA, 119 bp, homo sapiens
ttctaggtcaagtgtggaatctcaggtgacttttaaaagtgaaggttccagaccagagtattattgctaggttctgcagctcaggtgcatgtgagctacaaaactagcatctaagggta

SEQ ID NO: 17401 - DNA, 119 bp, homo sapiens
ttattgctaaggttctgcagctcaggtgcatgtgagctacaaaactagcatctaagggtataattgacctaggtttggatgacttttggacagactttcacattgtacatgaaaatcac

SEQ ID NO: 17402 - DNA, 119 bp, homo sapiens
taattgaccctaggtttggatgacttttggacagactttcacattgtacatgaaaatcacaaatggaatcttttaagtatgtttaaaaaataccatgagacctctgaactgaaaagaca

SEQ ID NO: 17403 - DNA, 119 bp, homo sapiens
aaatggaatgcttttaagtatgtttaaaaaataccatgagacctctgaactgaaaagacaaataatgttattttttttcttgtgtggaaaaggtctacagaaataatttttagagtggt

SEQ ID NO: 17404 - DNA, 119 bp, homo sapiens
aataatgttgattttttttcttgtgtggaaaaggtctacagaaataatttttagagtggtgcttaataattattaatactttttagggtaatgttttagttcttaaaaataagttcatg

SEQ ID NO: 17405 - DNA, 119 bp, homo sapiens
gcttaataaattattaatactttttagggtaatgttttagttcttaaaaataagttcatgtgaaagtagaagtgaactctgtatttaaaaatatagttttttgagtcatgaggaaacat

SEQ ID NO: 17406 - DNA, 119 bp, homo sapiens
tgaaagtagcaagtgaactctgtatttaaaaatatagttttttgagtcatgaggaaacattagcaaaacagctaagccttgatgtttattcatgttcgaagtgcattatagcatttgct

SEQ ID NO: 17407 - DNA, 119 bp, homo sapiens
tagcaaaaccagctaagccttgatgtttattcatgttcgaagtgcattatagcatttgctgtggatgtttctgacattgcctaatggagagcgtgggatcataaaggattttgtgttca

SEQ ID NO: 17408 - DNA, 119 bp, homo sapiens
gtggatgttttctgacattgcctaatggagagcgtgggatcataaaggattttgtgttcactaaggttaatctaactcacgggagagagagggctctgtctcttggtaccattatgcat

SEQ ID NO: 17409 - DNA, 119 bp, homo sapiens
ctaaggttaaatctaactcacgggagagagagggctctgtctcttggtaccattatgcattgtgatacttagagttgtgttcatatttcttgtaagaaaaatttttgcttttctttaga

SEQ ID NO: 17410 - DNA, 119 bp, homo sapiens
tgtgatactatagagttgtgttcatatttcttgtaagaaaaatttttgcttttctttagaaatataggtttagcaaaagtaagtatacaaagaggattatgacaaatagaccatttctt

SEQ ID NO: 17411 - DNA, 119 bp, homo sapiens
aatataggtattagcaaaagtaagtatacaaagaggattatgacaaatagaccatttctttaaaaatggaactgttgcatttaaacacatcgactgacagattatatggatatttaaaa

SEQ ID NO: 17412 - DNA, 119 bp, homo sapiens
taaaaatggtaactgttgcatttaaacacatcgactgacagattatatggatatttaaaaataactttaatcaatcttttaatattttgctgtttgctcttatgttctcccttctttct

SEQ ID NO: 17413 - DNA, 119 bp, homo sapiens
tttcttctgctctgtcagaagatatacaagtagccaaagcatcacgagccaagctgtttgtcttttgcctattgtcttttgattctcttgataaagagaaagcttttgaaattacttac

SEQ ID NO: 17414 - DNA, 119 bp, homo sapiens
tcttttgccatattgtcttttgattctcttgataaagagaaagcttttgaaattacttactgccctttgaagtctgttttacaaccccaaaggatattttaggactttaaaagggaagc

SEQ ID NO: 17415 - DNA, 119 bp, homo sapiens
tgccctttgaaagtctgttttacaaccccaaaggatattttaggactttaaaagggaagcttcagtggatcatttggttagattcttttcctaggttaaaaacatcggggaacttaaat

SEQ ID NO: 17416 - DNA, 119 bp, homo sapiens
ttcagtggattcatttggttagattcttttcctaggttaaaaacatcggggaacttaaatacataggaaggagttcacaaataaaatttagtttttttagaaagagaatattttaataa

SEQ ID NO: 17417 - DNA, 119 bp, homo sapiens
acataggaaaggagttcacaaataaaatttagtttttttagaaagagaatattttaataactgtagtatctacaagaaacatctcatggctttaagattaacgatagcgataaggccca

SEQ ID NO: 17418 - DNA, 119 bp, homo sapiens
ctgtagtatactacaagaaacatctcatggctttaagattaacgatagcgataaggcccactcaagcattcacagtggtgatattacatgtcacttagcaggatgcaacctggcctagg

SEQ ID NO: 17419 - DNA, 119 bp, homo sapiens
ctcaagcatctcacagtggtgatattacatgtcacttagcaggatgcaacctggcctagggatttccagagacaaggccacctcagcacagatgcaactttcataaattttagaacaaa

SEQ ID NO: 17420 - DNA, 119 bp, homo sapiens
gatttccagaagacaaggccacctcagcacagatgcaactttcataaattttagaacaaagcctaacctactagattaaacttgctctatgaaagaaacacttggtaattgacccagac

SEQ ID NO: 17421 - DNA, 119 bp, homo sapiens
gcctaaccttactagattaaacttgctctatgaaagaaacacttggtaattgacccagactgaatacattataagaaatgggaaagatctcccaaactctgagaacggtcctcaaatag

SEQ ID NO: 17422 - DNA, 119 bp, homo sapiens
tgaatacatgtataagaaatgggaaagatctcccaaactctgagaacggtcctcaaatagaagctctccagtcagttggtcatctgacctctgactatatccggcctatgacaccagcc

SEQ ID NO: 17423 - DNA, 119 bp, homo sapiens
aagctctcctagtcagttggtcatctgacctctgactatatccggcctatgacaccagccagctcctgcttctgtcttgtaagagcactgctggaataaactacttgagcattagatgg

SEQ ID NO: 17424 - DNA, 119 bp, homo sapiens
ggcgcgcgcgcttcccggccagacttggggccccggcagggttggaaaatgatggaagaggcggaggtgaggcgaccgagtgctgagaggaacctgcggaatcggccgagatggggtct

SEQ ID NO: 17425 - DNA, 119 bp, homo sapiens
gcggaggtggaggcgaccgagtgctgagaggaacctgcggaatcggccgagatggggtctggcgcgcgcttccctcggggacccttcgtgtccggtggttgctgttgcttggcctggtg

SEQ ID NO: 17426 - DNA, 119 bp, homo sapiens
ggcgcgcgctttccctcggggacccttcgtgtccggtggttgctgttgcttggcctggtgggcccagtctcggtgcggcgcggccaggtgggtgtccgcgccccgggtcggttgggacg

SEQ ID NO: 17427 - DNA, 119 bp, homo sapiens
atacgtgtaatgcaacattcagaggattgctgcatttagagaatgcgagttatgggattgaacccctgcgaacagctctcattttgagcacatcatttatcgaatggatgatgtctaca

SEQ ID NO: 17428 - DNA, 119 bp, homo sapiens
aacccctgcagaacagctctcattttgagcacatcatttatcgaatggatgatgtctacaaagagcctcgaaatgtggagtttccaacaaggatatagagaaagaaactgcaaaggatg

SEQ ID NO: 17429 - DNA, 119 bp, homo sapiens
aagagcctctgaaatgtggagtttccaacaaggatatagagaaagaaactgcaaaggatgaagaggaaggcctcccagcatgactcagctacttcgagtaaggaaataacataattctt

SEQ ID NO: 17430 - DNA, 119 bp, homo sapiens
cacgttctttactatattttatatacttttatttctttcttcccagatgtatattatgttaaatattcgattgtgctagttggactggagatttggaccaatggaaacctgatcaacat

SEQ ID NO: 17431 - DNA, 119 bp, homo sapiens
aaatattcgaattgtgctagttggactggagatttggaccaatggaaacctgatcaacatagttggggggctggtgatgtgctggggaacttcgtgcagtggcgggaaaagtttcttat

SEQ ID NO: 17432 - DNA, 119 bp, homo sapiens
agttgggggtgctggtgatgtgctggggaacttcgtgcagtggcgggaaaagtttcttatcacacgtcgagacatgacagtgcacagctagttctgtaagtattttttttttaagtact

SEQ ID NO: 17433 - DNA, 119 bp, homo sapiens
aaacattttctttgcgttcagaaacctaattactaccttcctgttctgaacagtttggacaaatcactgggagacatttgcttccattgttgctcatgaattgggtcataatcttggaa

SEQ ID NO: 17434 - DNA, 119 bp, homo sapiens
aaatcactgtggagacatttgcttccattgttgctcatgaattgggtcataatcttggaatgaatcacgtgatgggagagattgttcctgtggagcaaagagctgcatcatgaattcag

SEQ ID NO: 17435 - DNA, 119 bp, homo sapiens
tgaatcacgatgatgggagagattgttcctgtggagcaaagagctgcatcatgaattcaggagcatcgtagtacctgggttcttcttctcctttatttggtattgtagatccatgtttc

SEQ ID NO: 17436 - DNA, 119 bp, homo sapiens
gtgacatagatctttttcttaatgtttattataggggttccagaaactttagcagttgcagtgcagaggctttgagaagttaactttaaataaaggaggaaactgccttcttaatattc

SEQ ID NO: 17437 - DNA, 119 bp, homo sapiens
gtgcagaggactttgagaagttaactttaaataaaggaggaaactgccttcttaatattccaaagcctgtgaagcctatagtgctccctcctgtggtaataagttggtggacgctgggg

SEQ ID NO: 17438 - DNA, 119 bp, homo sapiens
caaagcctgatgaagcctatagtgctccctcctgtggtaataagttggtggacgctggggaagagtgtgctgtggtactccaaaggtcagtttaatttttgacttttgccttgtaaaat

SEQ ID NO: 17439 - DNA, 119 bp, homo sapiens
aatttgaattctatttcactagttccttccaggaggtactttatgccgaggaaaaaccagtgagtgtgagttccagagtactgcaatggttcttctcagttctgtcagccagatgtttt

SEQ ID NO: 17440 - DNA, 119 bp, homo sapiens
tgagtgtgatgttccagagtactgcaatggttcttctcagttctgtcagccagatgtttttattcagaaggatatccttgccagaataacaaagcctattgctacaacggcatgtgcca

SEQ ID NO: 17441 - DNA, 119 bp, homo sapiens
tattcagaatggatatccttgccagaataacaaagcctattgctacaacggcatgtgccagtattatgagctcaatgtcaagtcatctttggctcaagtaagatatcatcatttataat

SEQ ID NO: 17442 - DNA, 119 bp, homo sapiens
tttatgttgcattatttctctctctttataggaatgctttgtgtggaaagcttcagtgtgagaatgtacagagatacctgtatttggaattgtgcctgctattattcaaacgcctagtc

SEQ ID NO: 17443 - DNA, 119 bp, homo sapiens
agaatgtacaagagatacctgtatttggaattgtgcctgctattattcaaacgcctagtcgaggcaccaatgttggggtgtggatttccagctaggatcagatgttccagatcctggga

SEQ ID NO: 17444 - DNA, 119 bp, homo sapiens
gaggcaccaaatgttggggtgtggatttccagctaggatcagatgttccagatcctgggatggttaacgaggcacaaaatgtggtgctggaaaggtaatcaaaatattttttatttaca

SEQ ID NO: 17445 - DNA, 119 bp, homo sapiens
ctgcctagtatgagtttggtgactgttgatgtaaaattcttctctctagaaatgaatactgcattgaggacggacttctggtcttcttcttcctaattgttccccttattgtctgtgct

SEQ ID NO: 17446 - DNA, 119 bp, homo sapiens
gcattgagggacggacttctggtcttcttcttcctaattgttccccttattgtctgtgctatttttatctcatcaagagggatcaactgtggagaagctacttcagaaagaagagatca

SEQ ID NO: 17447 - DNA, 119 bp, homo sapiens
atttttatcttcatcaagagggatcaactgtggagaagctacttcagaaagaagagatcacaaacatatagtacttagatttttttcttttaattcctatattaaatatatacatacat

SEQ ID NO: 17448 - DNA, 119 bp, homo sapiens
tttcccctcgcaggccacctccaccacaaccgaaagtatcatctcagggaaacttaattcctgcccgtctgctcctgcacctcctttatatagttccctcacttgatttttttaacctt

SEQ ID NO: 17449 - DNA, 119 bp, homo sapiens
ctgcccgtcctgctcctgcacctcctttatatagttccctcacttgatttttttaaccttctttttgcaatgtcttcagggaactgagctaatactttttttttttcttgatgttttct

SEQ ID NO: 17450 - DNA, 119 bp, homo sapiens
ctttttgcaaatgtcttcagggaactgagctaatactttttttttttcttgatgttttcttgaaaagccttctgttgcaactatgaatgaaaacaaaacaccacaaaacagacttcact

SEQ ID NO: 17451 - DNA, 119 bp, homo sapiens
tgaaaagcctttctgttgcaactatgaatgaaaacaaaacaccacaaaacagacttcactaacacagaaaacagaaactgagtgtgagagttgtgaaatacaaggaaatgcagtaaagc

SEQ ID NO: 17452 - DNA, 119 bp, homo sapiens
aacacagaaaaacagaaactgagtgtgagagttgtgaaatacaaggaaatgcagtaaagccagggaattacaataacatttccgtttccatcattgaataagtcttattcagtcatcgg

SEQ ID NO: 17453 - DNA, 119 bp, homo sapiens
cagggaatttacaataacatttccgtttccatcattgaataagtcttattcagtcatcggtgaggttaagcactaatcatggattttttgaacatgttattgcagtgattctcaaatta

SEQ ID NO: 17454 - DNA, 119 bp, homo sapiens
tgaggttaatgcactaatcatggattttttgaacatgttattgcagtgattctcaaattaactgtattgtgtaagagttttgtcattaagtgtttaagtgttattctgaattttctacc

SEQ ID NO: 17455 - DNA, 119 bp, homo sapiens
actgtattggtgtaagagttttgtcattaagtgtttaagtgttattctgaattttctaccttagttatcttaatgtagttcctcattgaacatgtgataatctaatacctgtgaaaact

SEQ ID NO: 17456 - DNA, 119 bp, homo sapiens
ttagttatcattaatgtagttcctcattgaacatgtgataatctaatacctgtgaaaactgactaatcactgccaataatatctaatatttttcatcatgcacgaattaataatcatca

SEQ ID NO: 17457 - DNA, 119 bp, homo sapiens
gactaatcagctgccaataatatctaatatttttcatcatgcacgaattaataatcatcatactctagatcttgtctgtcactcactacatgaataagcaaatattgtcttcaaaagaa

SEQ ID NO: 17458 - DNA, 119 bp, homo sapiens
tactctagaatcttgtctgtcactcactacatgaataagcaaatattgtcttcaaaagaatgcacaagaccacaattaagatgtcatattattttgaaagtacaaaatatactaaaaga

SEQ ID NO: 17459 - DNA, 119 bp, homo sapiens
tgcacaagaaccacaattaagatgtcatattattttgaaagtacaaaatatactaaaagagtgtgtgtgattcacgcagttactcgcttccatttttatgacctttcaactataggtaa

SEQ ID NO: 17460 - DNA, 119 bp, homo sapiens
gtgtgtgtgtattcacgcagttactcgcttccatttttatgacctttcaactataggtaataactcttaagaaattaatttaatattagaatttctattatgaatcatgtgaaagcatg

SEQ ID NO: 17461 - DNA, 119 bp, homo sapiens
taactcttagagaaattaatttaatattagaatttctattatgaatcatgtgaaagcatgacattcgttacaatagcactattttaaataaattataagctttaaggtacgaagtattt

SEQ ID NO: 17462 - DNA, 119 bp, homo sapiens
acattcgttcacaatagcactattttaaataaattataagctttaaggtacgaagtatttaatagatctatcaaatatgttgattcatggctataataaagcaggagcaattataaaat

SEQ ID NO: 17463 - DNA, 119 bp, homo sapiens
aatagatctaatcaaatatgttgattcatggctataataaagcaggagcaattataaaatcttcaatcattgaacttttacaaaaccacttgagaatttcatgagcactttaaaatctg

SEQ ID NO: 17464 - DNA, 119 bp, homo sapiens
cttcaatcaattgaacttttacaaaaccacttgagaatttcatgagcactttaaaatctgaactttcaagcttgctattaaatcatttagaatgtttacatttactaaggtgtgctggg

SEQ ID NO: 17465 - DNA, 119 bp, homo sapiens
aactttcaaagcttgctattaaatcatttagaatgtttacatttactaaggtgtgctgggtcatgtaaatattagacactaatattttcatagaaattaggctggagaaagaaggaaga

SEQ ID NO: 17466 - DNA, 119 bp, homo sapiens
tcatgtaaaatattagacactaatattttcatagaaattaggctggagaaagaaggaagaaatggttttttaaatacctacaaaaaagttactgtggtatctatgagttatcatcttag

SEQ ID NO: 17467 - DNA, 119 bp, homo sapiens
aatggttttcttaaatacctacaaaaaagttactgtggtatctatgagttatcatcttagctgtgttaaaatgaatttttactatggcagatatggtatggatcgtaaaattttaagca

SEQ ID NO: 17468 - DNA, 119 bp, homo sapiens
ctgtgttaaaaatgaatttttactatggcagatatggtatggatcgtaaaattttaagcactaaaaatttttcataacctttcataataaagtttaataataggtttattaactgaatt

SEQ ID NO: 17469 - DNA, 119 bp, homo sapiens
ctaaaaattttttcataacctttcataataaagtttaataataggtttattaactgaatttcattagtttttaaaagtgtttttggtttgtgtatatatacatatacaaatacaacatt

SEQ ID NO: 17470 - DNA, 119 bp, homo sapiens
tcattagttttttaaaagtgtttttggtttgtgtatatatacatatacaaatacaacatttacaataaaaaaatacttgaaattctcttttgtgtctcctagtagcttcctactcaact

SEQ ID NO: 17471 - DNA, 119 bp, homo sapiens
tacaataaataaaatacttgaaattctcttttgtgtctcctagtagcttcctactcaactatttataattcattaattaaaaagttataattttagataaaaattctagtcaaattttt

SEQ ID NO: 17472 - DNA, 119 bp, homo sapiens
atttataatctcattaattaaaaagttataattttagataaaaattctagtcaaatttttacagatatttctcactaattttcagacttttgccaaagtgtgcacaatggctttttgtt

SEQ ID NO: 17473 - DNA, 119 bp, homo sapiens
acagatattatctcactaattttcagacttttgccaaagtgtgcacaatggctttttgttaataaagaaagattagttttgaagaaggcaaaaatttcagttttctgaagacagcatgt

SEQ ID NO: 17474 - DNA, 119 bp, homo sapiens
aataaagaacagattagttttgaagaaggcaaaaatttcagttttctgaagacagcatgttattttaacatcaagtatacatattaaaaattgtgagcaatctcaaatgaaggtccatc

SEQ ID NO: 17475 - DNA, 119 bp, homo sapiens
taattttcttataaagaaaaacacccttcacatatccttacataaagatactattaatgtatatgattatgttgaaacctaactagctgaacaaatgttcaacagattttggaccccat

SEQ ID NO: 17476 - DNA, 119 bp, homo sapiens
atatgattaatgttgaaacctaactagctgaacaaatgttcaacagattttggaccccatattctacatttcaagtttataacaaaattaagaaattataaaatactaagtataaaact

SEQ ID NO: 17477 - DNA, 119 bp, homo sapiens
attctacattttcaagtttataacaaaattaagaaattataaaatactaagtataaaacttatgtcataattgagggctatgttgaatttgaaagctgagatgatatctttcttaataa

SEQ ID NO: 17478 - DNA, 119 bp, homo sapiens
tatgtcataaattgagggctatgttgaatttgaaagctgagatgatatctttcttaataaatgaaatatataaactgcagtagaaacagtacatctttaccggttatttatttatttat

SEQ ID NO: 17479 - DNA, 119 bp, homo sapiens
tttgattaaaatattctgatacaatagtcaaactcatattattttatgcataatctgaaaaataccagagtaattgacagtaattttttaaaatgtaaacatttcctttcctttgtgta

SEQ ID NO: 17480 - DNA, 119 bp, homo sapiens
aataccagatgtaattgacagtaattttttaaaatgtaaacatttcctttcctttgtgtagttacgttatgttaactaaaaacagtccatgtataagacaagtaagtatgattccatcc

SEQ ID NO: 17481 - DNA, 119 bp, homo sapiens
gttacgttattgttaactaaaaacagtccatgtataagacaagtaagtatgattccatccctttccgtgagtcataagaatgaccataagcaaaagttaaaattacattcttgatttgt

SEQ ID NO: 17482 - DNA, 119 bp, homo sapiens
ctttccgtgtagtcataagaatgaccataagcaaaagttaaaattacattcttgatttgtttaaaaatgaaagcagatattgagaagccatcaactgtgcctgacgtattttctaaatt

SEQ ID NO: 17483 - DNA, 119 bp, homo sapiens
ttaaaaatgcaaagcagatattgagaagccatcaactgtgcctgacgtattttctaaattatttttgttatcaattacatcaacatgatttcacagagacctaaagatgccacatagag

SEQ ID NO: 17484 - DNA, 119 bp, homo sapiens
atttttgttaatcaattacatcaacatgatttcacagagacctaaagatgccacatagagtagtatggctatagactcctcagctgaaagtttctatcacggccaggcgcgatggctca

SEQ ID NO: 17485 - DNA, 119 bp, homo sapiens
ataatgaattataatttaatctgacatccacttaaaacaagtgttaatttttttatcattagctgactttgctagtatttttaagcggaatatttctaaatttttttctaaaccaattt

SEQ ID NO: 17486 - DNA, 119 bp, homo sapiens
agctgacttgtgctagtatttttaagcggaatatttctaaatttttttctaaaccaatttaatcagagacttgtttaaaatataactttctagaaacatacaaagatgcacatgagcag

SEQ ID NO: 17487 - DNA, 119 bp, homo sapiens
aatcagagaacttgtttaaaatataactttctagaaacatacaaagatgcacatgagcagctactttagaataactttcatgttctcttcaagtacaaaatcgccgatttttatgctct

SEQ ID NO: 17488 - DNA, 119 bp, homo sapiens
ctactttagcaataactttcatgttctcttcaagtacaaaatcgccgatttttatgctcttaaaatgtatgacatttaattacttcaaaagtagagaaaaaagcatttaaaaagtaaaa

SEQ ID NO: 17489 - DNA, 119 bp, homo sapiens
taaaatgtactgacatttaattacttcaaaagtagagaaaaaagcatttaaaaagtaaaaaatctttccaacacctgtgttgctcatgtcagaagatttctacatttttaaagttcagg

SEQ ID NO: 17490 - DNA, 119 bp, homo sapiens
aatctttccaaacacctgtgttgctcatgtcagaagatttctacatttttaaagttcaggcaagcattatttaaaagatttgctccttttctttcattcatttaaccaggttggatatc

SEQ ID NO: 17491 - DNA, 119 bp, homo sapiens
caagcattagtttaaaagatttgctccttttctttcattcatttaaccaggttggatatcactcatgtattttagttaggaagccattcacatgacataacttctcattgaatgctctc

SEQ ID NO: 17492 - DNA, 119 bp, homo sapiens
actcatgtatttttagttaggaagccattcacatgacataacttctcattgaatgctctcagaaatgctctgagataatcttcagacttcattataaaatttgtccattcctgacaaat

SEQ ID NO: 17493 - DNA, 119 bp, homo sapiens
agaaatgctgctgagataatcttcagacttcattataaaatttgtccattcctgacaaatgtcctccatgagaattcttcaccaccatattccagaggaagaatgtctgggaaatgctg

SEQ ID NO: 17494 - DNA, 119 bp, homo sapiens
gtcctccatggagaattcttcaccaccatattccagaggaagaatgtctgggaaatgctgaagcaagcttgtttgtagttgttcccatgcatgtgaatctgaaatagccaaaacacttt

SEQ ID NO: 17495 - DNA, 119 bp, homo sapiens
tgacagttaaaatatacatttaccgtaagtacagcagcaatcttcttggctacggatggagtgatttgaaagcatgagaaaactgccaaccttccagatcaaagatagccttgattcca

SEQ ID NO: 17496 - DNA, 119 bp, homo sapiens
gtgatttgaaaagcatgagaaaactgccaaccttccagatcaaagatagccttgattccattccgctgatttctacctcctgtacaataagctcggatgtgattagacttactcgaaat

SEQ ID NO: 17497 - DNA, 119 bp, homo sapiens
ttccgctgagtttctacctcctgtacaataagctcggatgtgattagacttactcgaaatacgtcataactgtaaaaactttggggtcccagtgtgctaaaaaaaataaagcatatcat

SEQ ID NO: 17498 - DNA, 119 bp, homo sapiens
actggaggagaggagaaaaaaaaaagagttgtgtatgacttaccgattctgtaaataagaactttgctgcagtgggatccctggatctcaggactccatggtagccagcctttaggagg

SEQ ID NO: 17499 - DNA, 119 bp, homo sapiens
actttgctgccagtgggatccctggatctcaggactccatggtagccagcctttaggaggccaataatattctagggtgtagatctgcacttatttctggacattctgctctccactta

SEQ ID NO: 17500 - DNA, 119 bp, homo sapiens
ccaataatacttctagggtgtagatctgcacttatttctggacattctgctctccacttataatagtttttagtaactgaaaaataaaattaaaattgtctacaaatggcatacatggt

SEQ ID NO: 17501 - DNA, 119 bp, homo sapiens
acccgccaggccaggtccagatcgaaatcccgggcgcgcaggaaccgcagcaggaaggagtcggtgagcgcagcggcgcgagcgggacgccagcttcccgggcccggcgccgcagcgcc

SEQ ID NO: 17502 - DNA, 119 bp, homo sapiens
tcggtgagcggcagcggcgcgagcgggacgccagcttcccgggcccggcgccgcagcgccgccaggcccgctgcagcaacggagagtggtccggtagcgcgttgagctgcggccccgcc

SEQ ID NO: 17503 - DNA, 119 bp, homo sapiens
gccaggcccggctgcagcaacggagagtggtccggtagcgcgttgagctgcggccccgccgagggctggatcgcgcctctgccatgcccgccgccgctgctgcggccgcagctacccgg

SEQ ID NO: 17504 - DNA, 119 bp, homo sapiens
acaagatcatagtcagctgttgagggttgagaccaaactttttgcctgtggattttacagcctttcaaaaaggacattgtgagaacgggatatgcatgtatattgttgcttccaggttt

SEQ ID NO: 17505 - DNA, 119 bp, homo sapiens
cctttcaaacaaggacattgtgagaacgggatatgcatgtatattgttgcttccaggtttcagtctttgccagaaagagattttaagactcaatatatgcatttatttaaaaatataaa

SEQ ID NO: 17506 - DNA, 119 bp, homo sapiens
taaaagactagattgaatgtccctagattttcacacattcaaagactacattttttcaagagatggaatggacacaaagcaagaatgaacggttctatactctcgaagaaagaaacccg

SEQ ID NO: 17507 - DNA, 119 bp, homo sapiens
agatggaatgggacacaaagcaagaatgaacggttctatactctcgaagaaagaaacccgggacatggtgggatccctggcctaggtgttcaaggtggtggcatcctgaacttccagca

SEQ ID NO: 17508 - DNA, 119 bp, homo sapiens
ggacatggtggggatccctggcctaggtgttcaaggtggtggcatcctgaacttccagcagttccctagccggttccactaatgtcattccgcggctggagttaaagaagcaaacggtc

SEQ ID NO: 17509 - DNA, 119 bp, homo sapiens
gttccctagcccggttccactaatgtcattccgcggctggagttaaagaagcaaacggtctacgtcaccagaccatgagacggtttcaaaaatggtctacgtcaccaagaccatgagat

SEQ ID NO: 17510 - DNA, 119 bp, homo sapiens
tacgtcaccaagaccatgagacggtttcaaaaatggtctacgtcaccaagaccatgagatggtttcacaaataggcttggcctatgagaggaggggaagcagcttcttactcagctggg

SEQ ID NO: 17511 - DNA, 119 bp, homo sapiens
ggtttcacacaataggcttggcctatgagaggaggggaagcagcttcttactcagctggggaggccctttactggggtgcaggcctcctcgccccatggcaggcgacttgcagccaagt

SEQ ID NO: 17512 - DNA, 119 bp, homo sapiens
gaggcccttatactggggtgcaggcctcctcgccccatggcaggcgacttgcagccaagtggaggggaacgtgccacgtcctggaggctgtgtggcttcctcagctgggctctggggcc

SEQ ID NO: 17513 - DNA, 119 bp, homo sapiens
ggaggggaaccgtgccacgtcctggaggctgtgtggcttcctcagctgggctctggggcccactcagagtctgaggccccaggggtcacctagcccagatccagccttgctctggatac

SEQ ID NO: 17514 - DNA, 119 bp, homo sapiens
cactcagaggtctgaggccccaggggtcacctagcccagatccagccttgctctggatacccgtgtgactggggtggtgtgtgtttgaggggctgccaggaggacacagatggacgcct

SEQ ID NO: 17515 - DNA, 119 bp, homo sapiens
ccgtgtgacatggggtggtgtgtgtttgaggggctgccaggaggacacagatggacgcctgcttcgggttggagggagaggctggtgcagagcacgggggtgttggggggctctgtgac

SEQ ID NO: 17516 - DNA, 119 bp, homo sapiens
gcttcgggtgtggagggagaggctggtgcagagcacgggggtgttggggggctctgtgactgcccccaggcacaggagctgctcaggaacggattctgacgtctgcccccgagagtggc

SEQ ID NO: 17517 - DNA, 119 bp, homo sapiens
tgcccccagggcacaggagctgctcaggaacggattctgacgtctgcccccgagagtggctggggtccgggtgctgctgggcgggtccaaaccctgccacccatgctgtatggacctgc

SEQ ID NO: 17518 - DNA, 119 bp, homo sapiens
tggggtccgtggtgctgctgggcgggtccaaaccctgccacccatgctgtatggacctgccatggagacggggtccaagccctgcccacccacaccgtgtggacctgccacagaggaca

SEQ ID NO: 17519 - DNA, 119 bp, homo sapiens
catggagacgggggtccaagccctgcccacccacaccgtgtggacctgccacagaggacaggctcgctcgggttggcttccttcctgggacgctggcacagaggcacggtcgccacagt

SEQ ID NO: 17520 - DNA, 119 bp, homo sapiens
ggctcgctcagggttggcttccttcctgggacgctggcacagaggcacggtcgccacagtccctcggatcccgaaaggcggcaaactctttgtccttcccagtgggttttgatcaatac

SEQ ID NO: 17521 - DNA, 119 bp, homo sapiens
ccctcggatccccgaaaggcggcaaactctttgtccttcccagtgggttttgatcaatacaatcacccccgttgcagctgtgagtcctcgttcagcaaacttcaagaaacggagcagat

SEQ ID NO: 17522 - DNA, 119 bp, homo sapiens
aatcaccccacgttgcagctgtgagtcctcgttcagcaaacttcaagaaacggagcagatggtgctggattctgactctgtagtgcttgctgcctctgaatctccttcgaaatccgtct

SEQ ID NO: 17523 - DNA, 119 bp, homo sapiens
ggtgctggagttctgactctgtagtgcttgctgcctctgaatctccttcgaaatccgtcttttaattccagtaagtacagttctctatcaaatttgccagctgccaacggaatgctgtg

SEQ ID NO: 17524 - DNA, 119 bp, homo sapiens
cgacggcacgacccccaggcccaagggggaaggtgagcgggagaacactgacttgtctcgccccggcctactttcacccggaagaggccatacacagggcggtggtcggacgtcttgat

SEQ ID NO: 17525 - DNA, 119 bp, homo sapiens
ccccggcctcactttcacccggaagaggccatacacagggcggtggtcggacgtcttgatcccggggcagaagagtagctcacaggacagatgtcacccttgtggcggcttctgtacaa

SEQ ID NO: 17526 - DNA, 119 bp, homo sapiens
cccggggcaggaagagtagctcacaggacagatgtcacccttgtggcggcttctgtacaagacgcggtctttgggaagattgcagaggcaggaggtccagttacttgtgaggagccgtg

SEQ ID NO: 17527 - DNA, 119 bp, homo sapiens
tcctcatctccctccatgcccgcccccccaggccctcacctttccgcatctcccggatgagctggtcgtctgcagcagcgccggcacgtccaccaccaggccctggcacaggagggcgt

SEQ ID NO: 17528 - DNA, 119 bp, homo sapiens
gctggtcgtgctgcagcagcgccggcacgtccaccaccaggccctggcacaggagggcgtccacgactggcgcccgccactcaggcggaagttgaagtctccaaaccagaacacctcat

SEQ ID NO: 17529 - DNA, 119 bp, homo sapiens
ccacgactgtgcgcccgccactcaggcggaagttgaagtctccaaaccagaacacctcatcgaagcgggggtgacgtccgctgcggcacagtgggccatgtgtgggcacaggcagaggg

SEQ ID NO: 17530 - DNA, 119 bp, homo sapiens
gctcacctgtgggacgctgccaccttccagccgcgcccacccctccagccgcgcccacctgagcagaacagatgaggtccctgcggatgaagagcgacatgtagagcacgccgtgggcc

SEQ ID NO: 17531 - DNA, 119 bp, homo sapiens
gagcagaaccagatgaggtccctgcggatgaagagcgacatgtagagcacgccgtgggccgccgaggacgcagcacatagtgcgggcccagcgtctcctgcagacgagtctcccactcc

SEQ ID NO: 17532 - DNA, 119 bp, homo sapiens
gccgaggacagcagcacatagtgcgggcccagcgtctcctgcagacgagtctcccactcccgcctgcagggaggaagcacggccggctgggggacatggcctcccagctccgccacccc

SEQ ID NO: 17533 - DNA, 119 bp, homo sapiens
tccccgcccagcaccacccacagccactcaccttctggccctgcatgttccaggtggccacgaagagtgcacgttccggtctgggaagtagcgggccagctcatccgcccccaacaggg

SEQ ID NO: 17534 - DNA, 119 bp, homo sapiens
cgaagagtgccacgttccggtctgggaagtagcgggccagctcatccgcccccaacagggccccgctggcaggaggctgccctccaggtaactcctgtgacgggaggaccccaagctca

SEQ ID NO: 17535 - DNA, 119 bp, homo sapiens
ccccgctggccaggaggctgccctccaggtaactcctgtgacgggaggaccccaagctcagggccaggccaggacacatccctgggggtctgggccaggtccccagggacaatagcaaa

SEQ ID NO: 17536 - DNA, 119 bp, homo sapiens
acctgctgcggacgtccttgctgcggatgggcgccaggaggctgaaggaggatttggccgagcgaagggacagtcgtcgcaggccagggggctccgcggccggccggggcccaggctgc

SEQ ID NO: 17537 - DNA, 119 bp, homo sapiens
agcgaagggaacagtcgtcgcaggccagggggctccgcggccggccggggcccaggctgctgtgggccccaccaggagcggctgcgcgcggagcttgtagtctgcaagatccgagtcga

SEQ ID NO: 17538 - DNA, 119 bp, homo sapiens
tgtgggcccgcaccaggagcggctgcgcgcggagcttgtagtctgcaagatccgagtcgaccttgtttgtgtcctcagggagtcggaggcgatgtccaggctcagggcaggcggtgggc

SEQ ID NO: 17539 - DNA, 119 bp, homo sapiens
ccttgtttgctgtcctcagggagtcggaggcgatgtccaggctcagggcaggcggtgggcgcgggggcacaggctgggcagcctgggcgagctccccgccacggcggcgtctctgtgcg

SEQ ID NO: 17540 - DNA, 119 bp, homo sapiens
gcgggggcagcaggctgggcagcctgggcgagctccccgccacggcggcgtctctgtgcgggaggttcgggagctgctggccaccccagagagagggttaccccccgaggacgggctcc

SEQ ID NO: 17541 - DNA, 119 bp, homo sapiens
ggaggttcggggagctgctggccaccccagagagagggttaccccccgaggacgggctccctctctcacgctcaggaccccgcgggacttggggatttcctgcaaggaggtgctcaggc

SEQ ID NO: 17542 - DNA, 119 bp, homo sapiens
ctctctcactgctcaggaccccgcgggacttggggatttcctgcaaggaggtgctcaggcagggcgggggcagctgtgggcgggggccccggggccctcgctctgcactgagcccctgg

SEQ ID NO: 17543 - DNA, 119 bp, homo sapiens
agggcggggagcagctgtgggcgggggccccggggccctcgctctgcactgagcccctggagggactggcccattccgggcttccaggtcctcctggctgcctcgaaaacgcctcctcc

SEQ ID NO: 17544 - DNA, 119 bp, homo sapiens
agggactggtcccattccgggcttccaggtcctcctggctgcctcgaaaacgcctcctcctccagccctgtcgtccagggacagggctcgctccagtcgaggcctggcggggggccgcg

SEQ ID NO: 17545 - DNA, 119 bp, homo sapiens
tccagcccttgtcgtccagggacagggctcgctccagtcgaggcctggcggggggccgcggggcgatggtgctgctcgggctggcgggtcctcgccgctgggcgtggccggagtgctgc

SEQ ID NO: 17546 - DNA, 119 bp, homo sapiens
gggcgatgggtgctgctcgggctggcgggtcctcgccgctgggcgtggccggagtgctgcaggcaagcgggggctctcggagcccggagcatcgggtggggaccccgcgcgctgggccg

SEQ ID NO: 17547 - DNA, 119 bp, homo sapiens
aggcaagcgcggggctctcggagcccggagcatcgggtggggaccccgcgcgctgggccggcggagcgcgggaagctgtccttggagcgtcctcccttccggcggctgcggggccggct

SEQ ID NO: 17548 - DNA, 119 bp, homo sapiens
gcggagcgccgggaagctgtccttggagcgtcctcccttccggcggctgcggggccggctcggagggcccagattctccgccttggacggcatggacggtctctcccggggcaggcctc

SEQ ID NO: 17549 - DNA, 119 bp, homo sapiens
cggagggccgcagattctccgccttggacggcatggacggtctctcccggggcaggcctcggcgcgaggcgcaggcagcgcgaggggtcacgggtgccgggtccggggtcgccggcgca

SEQ ID NO: 17550 - DNA, 119 bp, homo sapiens
ggcgcgaggccgcaggcagcgcgaggggtcacgggtgccgggtccggggtcgccggcgcagcgaggagcgaaacgccgctgcggctcccgcttgggccggggatggtcgcggaggggcg

SEQ ID NO: 17551 - DNA, 119 bp, homo sapiens
gcgaggagcagaaacgccgctgcggctcccgcttgggccggggatggtcgcggaggggcgggggcggctccgcatggcccgggccccgagtcccgccagcccctcggggctcccagacg

SEQ ID NO: 17552 - DNA, 119 bp, homo sapiens
ggggcggctgccgcatggcccgggccccgagtcccgccagcccctcggggctcccagacgccgttcccaggcggtccgcaggcaaggcctgggggaacaggcggctgggcgcctgtcgc

SEQ ID NO: 17553 - DNA, 119 bp, homo sapiens
ccgttcccagggcggtccgcaggcaaggcctgggggaacaggcggctgggcgcctgtcgcgggggaggtcgaccccgacggggacgccgctcggggagaggggtgggaagcgggcaccc

SEQ ID NO: 17554 - DNA, 119 bp, homo sapiens
gggggaggttcgaccccgacggggacgccgctcggggagaggggtgggaagcgggcacccctggctgggtcgcagactccgaagtcgacccggtactcgcggaggcccggccgcccaga

SEQ ID NO: 17555 - DNA, 119 bp, homo sapiens
ctcaatcacagagttgaatcttatatagcttttatttcagtgatcagaagaatgcagtaaatggaatctcactaactaacattaggcatgcacctctacctgaaactgctgttagcttc

SEQ ID NO: 17556 - DNA, 119 bp, homo sapiens
atggaatctacactaactaacattaggcatgcacctctacctgaaactgctgttagcttctgattggccaaatctttataacttatttaggcacatcactgaattttttgtaccctgat

SEQ ID NO: 17557 - DNA, 119 bp, homo sapiens
tgattggcctaaatctttataacttatttaggcacatcactgaattttttgtaccctgatatacagggtagttaatttcttccttgtggcagtctagtaataagaattatgttcactgg

SEQ ID NO: 17558 - DNA, 119 bp, homo sapiens
atacagggtaagttaatttcttccttgtggcagtctagtaataagaattatgttcactggctagattccttataactaaaggcctctagactctcaggctgcctaccctaccttgagac

SEQ ID NO: 17559 - DNA, 119 bp, homo sapiens
ctagattcctttataactaaaggcctctagactctcaggctgcctaccctaccttgagacttacttaattggatatttaagcaaatcatcatataggaaagggagatcaagataactga

SEQ ID NO: 17560 - DNA, 119 bp, homo sapiens
ttacttaatatggatatttaagcaaatcatcatataggaaagggagatcaagataactgaagtgtactgataaacactcttacagatatttttctccagcattgacaatcaaacactag

SEQ ID NO: 17561 - DNA, 119 bp, homo sapiens
agtgtactgtataaacactcttacagatatttttctccagcattgacaatcaaacactagataaggatacaaattattcttcccctacttctgccctttctgataaacacaaggatctc

SEQ ID NO: 17562 - DNA, 119 bp, homo sapiens
ataaggataccaaattattcttcccctacttctgccctttctgataaacacaaggatctcccctgaaatagaaatgactccacacaaatgagagatttttacgtatgtggtcccactat

SEQ ID NO: 17563 - DNA, 119 bp, homo sapiens
ccctgaaatcagaaatgactccacacaaatgagagatttttacgtatgtggtcccactatcaaaattatggaagcagttaatggggctttgagaaaagcatagtcccatgtacagtaat

SEQ ID NO: 17564 - DNA, 119 bp, homo sapiens
caaaattataggaagcagttaatggggctttgagaaaagcatagtcccatgtacagtaatatgcatctaatagagttttctttcgcctgtcaattattttcacaagattagcattaaaa

SEQ ID NO: 17565 - DNA, 119 bp, homo sapiens
atgcatctaaatagagttttctttcgcctgtcaattattttcacaagattagcattaaaaaatacaagcaacatatgacccttaagcttcacacacaaaaaattggtctttgttcattc

SEQ ID NO: 17566 - DNA, 119 bp, homo sapiens
aatacaagcaaacatatgacccttaagcttcacacacaaaaaattggtctttgttcattctcagatgacggatgtcccaagagtaacaaaagatgggagccaatcctctcatagctgtt

SEQ ID NO: 17567 - DNA, 119 bp, homo sapiens
tcagatgacaggatgtcccaagagtaacaaaagatgggagccaatcctctcatagctgtttcttcaatctcccatcaacagctcttcatttcttgaactaccttccttttccaaagagg

SEQ ID NO: 17568 - DNA, 119 bp, homo sapiens
tcttcaatcatcccatcaacagctcttcatttcttgaactaccttccttttccaaagaggtaatgctgaatcagtcagaaaggctttctgagaaaactggcttggatttctgggtctgt

SEQ ID NO: 17569 - DNA, 119 bp, homo sapiens
taatgctgagatcagtcagaaaggctttctgagaaaactggcttggatttctgggtctgttccagtcgatcaagatgaactggcttgtatcaatgaagcgctcaacgcagttcacaaaa

SEQ ID NO: 17570 - DNA, 119 bp, homo sapiens
tccagtcgattcaagatgaactggcttgtatcaatgaagcgctcaacgcagttcacaaaacaggcctcacccgactgtccaactttggcccaggcttgtccatgcacttctcctgctca

SEQ ID NO: 17571 - DNA, 119 bp, homo sapiens
caatccaacaagaaagcaaataagtatgtacgttggaagagattacaccacttttatagttactgggctgagccactcatttttcagcggagagggttagaactgggtaatgaaggtaa

SEQ ID NO: 17572 - DNA, 119 bp, homo sapiens
tactgggctggagccactcatttttcagcggagagggttagaactgggtaatgaaggtaaatcccgagggtccaggaatagcagattcactgattcactgactctctgggactcgggct

SEQ ID NO: 17573 - DNA, 119 bp, homo sapiens
atcccgaggagtccaggaatagcagattcactgattcactgactctctgggactcgggctgccaaaaataaatcccagtactgggggctccgatcagtcttggtgaccagcactaggca

SEQ ID NO: 17574 - DNA, 119 bp, homo sapiens
gccaaaaataaaatcccagtactgggggctccgatcagtcttggtgaccagcactaggcagcttcaacccgggtgcctgaaagtgctgggtgtccagtggcataagtcttctttgatac

SEQ ID NO: 17575 - DNA, 119 bp, homo sapiens
gcttcaacctcgggtgcctgaaagtgctgggtgtccagtggcataagtcttctttgatacccagtcctcacaccaacaaagccgaggtccggaatgacagtccccagagaagcggagtc

SEQ ID NO: 17576 - DNA, 119 bp, homo sapiens
ccagtcctctacaccaacaaagccgaggtccggaatgacagtccccagagaagcggagtcacccttctccatccggctaggccacaggaacctgagaaaatcaagggttgctgccaggt

SEQ ID NO: 17577 - DNA, 119 bp, homo sapiens
gtcccagccccaggctcctcacccaacaaagttcagtcatctggtgcaccagctgctggaagcgctgctttgagtctctacctcgatgaaatgctgcaactgcgggtccactgcaccca

SEQ ID NO: 17578 - DNA, 119 bp, homo sapiens
agcgctgcttttgagtctctacctcgatgaaatgctgcaactgcgggtccactgcacccaaacccgccgggaggaagaggaggaggaatccatcccagggcgaccaagcttgcagagac

SEQ ID NO: 17579 - DNA, 119 bp, homo sapiens
aacccgccgcggaggaagaggaggaggaatccatcccagggcgaccaagcttgcagagacgaactccgcccgaccttcacgtgtctccgcgacggaaccggaaccacagctagctgcct

SEQ ID NO: 17580 - DNA, 119 bp, homo sapiens
gaactccgcaccgaccttcacgtgtctccgcgacggaaccggaaccacagctagctgcctctgggaccgccccgtgagtgcactgcgtcggcgcgaggcaggcgtccaactccaccccg

SEQ ID NO: 17581 - DNA, 119 bp, homo sapiens
ctgggaccgcccccgtgagtgcactgcgtcggcgcgaggcaggcgtccaactccaccccgccgcctccccaccttggcgccggtgcttcgttcccggagtcggcgggttccactccccg

SEQ ID NO: 17582 - DNA, 119 bp, homo sapiens
ccgcctcccacaccttggcgccggtgcttcgttcccggagtcggcgggttccactccccggaccccgcatcccgtaaccccgcaaccctgccgttgcgcccagccttgcgccttgagat

SEQ ID NO: 17583 - DNA, 119 bp, homo sapiens
gaccccgcaatcccgtaaccccgcaaccctgccgttgcgcccagccttgcgccttgagatcgcagggctacagcccagagccgaggtgccgttgagatgttactccaaaaagaaaagaa

SEQ ID NO: 17584 - DNA, 119 bp, homo sapiens
ctctgccgtctgtaggtcttttccaaatacctcaactttgtgtctatcatcctaaggcttcatcacaccgctacatgtacaatattgaatcccgaagaagccaggtaaaaggaaggcag

SEQ ID NO: 17585 - DNA, 119 bp, homo sapiens
tacttaaatctgattgcctccaggaattctacgatgaatggccaatcaagcttggagaagtagagcctttaaaggtccaaagacacctgatggcagggtacgtgcaaatgtcttccttg

SEQ ID NO: 17586 - DNA, 119 bp, homo sapiens
ttcccataatatcctctttctttcttaggaagtcaacttttataaaatcattgattacattttacatggaaagaagagatcaaagtgattccgtgagtattggcaggaagttgctgccg

SEQ ID NO: 17587 - DNA, 119 bp, homo sapiens
atgattttttttcttctcttccccaaggacgcctcctgcagaccactggacactcattagtgggttgccacatatgttgctgaaaatggatttgtaagttattgaacaaattcaaattt

SEQ ID NO: 17588 - DNA, 119 bp, homo sapiens
aatatttcagaccatttgtctcctcttgccttccagatctgtaacatgatgaatgcccctgcggatgaaacttcacatttcaggtaactgcactctgggtcagacctcacctcttgggg

SEQ ID NO: 17589 - DNA, 119 bp, homo sapiens
acacctcaattgcttttacattttagaaatttcaagagaagttaaatgttgatgtaattgacgactgtgagaaaaacaacttgttgcaattttggtaagtgttttctttctaaccttaa

SEQ ID NO: 17590 - DNA, 119 bp, homo sapiens
ttttaggttcttaccagatggatgtacactgtgaggaaagggtaccgagctgtcacttaccacaattggggcatgggttcaacgtggggcagaccatgtttactttgctgatggtaggt

SEQ ID NO: 17591 - DNA, 119 bp, homo sapiens
tttagacaggaagattaaagaagtactacacagatctcgaagcctttgccatgcttgctgctgctttctccatgatattgaccacagaggcaccaataatttgtaccagatgaagtaag

SEQ ID NO: 17592 - DNA, 119 bp, homo sapiens
gttgttttccttctagatccacgtctccattagcaagacttcatggttcttctattttggagaggcacccctggagtacagtaagactctgttgcaggatgaggtacgtaaacctctct

SEQ ID NO: 17593 - DNA, 119 bp, homo sapiens
catcttacagagtttaaacatcttccagaacctaaataagcggcagtttgaaacagttattcatttgttgaggtcgcaataatagcaactgacctggctttatatttcaagtaagtaca

SEQ ID NO: 17594 - DNA, 119 bp, homo sapiens
ttctaggaagaggaccatgtttcaaaaaattgttgatgcctgtgaacaaatgcaaacggaagaagaagcatcaaatatgtaactgttgatccaaccaagaaagagattatcatgtaggt

SEQ ID NO: 17595 - DNA, 119 bp, homo sapiens
ttttaaaattttttgttttcttcctaagggcaatgatgatgacggcatgtgacttgtctgctattaccagccctgggaggtgcaaagtcaggtgagtccagttaagttttcttttctgt

SEQ ID NO: 17596 - DNA, 119 bp, homo sapiens
aaccaagcctttctcatttgcaggtagcacttatggttgcaaatgaattttgggaacaaggagatctgggagaacagtgttgcagcaacaacccattgtaagaccttgacataaaaatg

SEQ ID NO: 17597 - DNA, 119 bp, homo sapiens
atttatttctctttctagcctatgatggacagaaacaaaagagatgaattacctaaacttcaagttggattattgattttgtttgtacttttgtatataaggtaagtaagcaaattatt

SEQ ID NO: 17598 - DNA, 119 bp, homo sapiens
ttgtgacgctgttgcagaatcatccggaccaaagttcagcagcctttccacccaacgccggatggggctggacaggagtgaccgcccctggccacaccattggtaagagggctcaggga

SEQ ID NO: 17599 - DNA, 119 bp, homo sapiens
ttcccagcacggcctcccctcctgtttccagcgcctccaatgacccagtgggatcctactccatcaatggatcctggggattcctcgctccaatggtgagaagaggaaacgtgatgaag

SEQ ID NO: 17600 - DNA, 119 bp, homo sapiens
gtttgtctgtctcttatttgctctagttgaggtatacactgatcctgcccacattagaggaggtggaggttgcatctggtctggactttaagaggtatgagggccagagggaacatggc

SEQ ID NO: 17601 - DNA, 119 bp, homo sapiens
tttttccaggtcgtgacatggcgagcaccactctgcctggttacccccctcacgtgccccccactggccgggaagctaccccacctccaccctggcaggaatggtgcctggtaggtgac

SEQ ID NO: 17602 - DNA, 119 bp, homo sapiens
tgtccctctctctccttagaggctgcagttggtccctcatcctccctcatgagcaagccggggaggaagttgcagaagtgcccccttgtgtgcaacccactgtatgtcatggcccctcc

SEQ ID NO: 17603 - DNA, 119 bp, homo sapiens
ccccgaccctcccgcagggagcgagttctccggcaacccgtacagccacccccagtacacggcctacaagaggcttggagattcagcaaccccgccttactaagtgagtacgccacctg

SEQ ID NO: 17604 - DNA, 119 bp, homo sapiens
tccccggccctgacaccccagctcggaggagtggcagaaagtgagcaagagtgagcgggagaagatggggtgaccgtgcaggacgacggtgagttctggtgagtgtgtatgtgccctgg

SEQ ID NO: 17605 - DNA, 119 bp, homo sapiens
agggagctgcgcctggatgagcccccacacacctgctggagctccctctgtggctacccccagctggtgcccaggtacatgtcctgggagctgctggcctcaaggactccccaacaggt

SEQ ID NO: 17606 - DNA, 119 bp, homo sapiens
gggtattacagagagataagtcaggatgcaaagatccttttgtcttttgcaaagaaggcagctgggcagtgataggaacaacattcagctccgtgagtacttctgaacttctggtgaat

SEQ ID NO: 17607 - DNA, 119 bp, homo sapiens
ctctaatctcagctaatttctcctttattcttttccatagatttggagatgacattccaggaatggagggctaggaacaggtaagccatccactgatttaagtgagaacttcgcacttg

SEQ ID NO: 17608 - DNA, 119 bp, homo sapiens
gcggccgcggcgcggcgggaccatggagctcagagcgcagccccggcgccggcggcgggaccgcggaccgtgagtgagggctgcggtcgccccggctctccgctgtaggctgctgtggc

SEQ ID NO: 17609 - DNA, 119 bp, homo sapiens
tttctttgtagttttagttttgattgctgttaactactactgataactgagccaaagtggtgatgctactgaggggaatttctgcaacccatagtcaacgattacatggtaagagtgtg

SEQ ID NO: 17610 - DNA, 119 bp, homo sapiens
gagatgacaagaaggatgggctgaagttctatactgatccttcctatttctttgacctctggaaagaaaaatgctacaggacacagaagacaaaaggaaagagaaaaggcgtcaaaagg

SEQ ID NO: 17611 - DNA, 119 bp, homo sapiens
gatatagacaagacagacggacacttaccttacagcctcatgggaggttagaaaaagtcaaatatccttaaattccaaatagccagctatcctaaaagaaatcaagagtattgagttag

SEQ ID NO: 17612 - DNA, 119 bp, homo sapiens
caatacatacaaagtagatgtggcgagtgagggctgctctagcaatttttatttttaatcacagtggagctgtgttggagctgaggccggtcccgctctcagggagatttgctgagaaa

SEQ ID NO: 17613 - DNA, 119 bp, homo sapiens
atacccggagctctggcatctggatgatgaggctcatgggcacgtggacgatggggctcttcctgtagtcattgggacgaggttgggggccagctcatagaatcgcgaatgcagccttg

SEQ ID NO: 17614 - DNA, 119 bp, homo sapiens
cccagtcccagtcccaacagggtgaacgagaagccacacttacttgaggatgtccttcttattgaagaagtgcagtcctgttgagggaaaacacacaacacacagtcagtgtgcggctc

SEQ ID NO: 17615 - DNA, 119 bp, homo sapiens
gcccatcacctccttgggcgtccaggcatagtcctgcatccgctccactgacacgatgctgttctctagtctgtccagttgcgaacaacccactgcagtgtctgggtcacctggtgcaa

SEQ ID NO: 17616 - DNA, 119 bp, homo sapiens
acttgggcccctggaggtggcagcagtgggtggggaggggtgggtgaagctggtggttaccctgccgtatggatgctgtcctttcctgctggccatcctgccctgtcagggtcatccag

SEQ ID NO: 17617 - DNA, 119 bp, homo sapiens
aggaacctctgtctgggcttctgaagtggtacggtccttctcagggactgacttgatggacctgtcattagaggaaatgaagacaaagtcagtatctctcccaatggtggggtgtatgt

SEQ ID NO: 17618 - DNA, 119 bp, homo sapiens
tgtggcaccatggtggactcacctctcgcgtctaagctcgggcctcctgcctgcagaggtgcctctgggtccttggtgctggtcccaggttctgtttctgcaaggtcaagagagtcctg

SEQ ID NO: 17619 - DNA, 119 bp, homo sapiens
tactacgggtgtcgttctgtacctgtggaggcagggagggctttcctgggaccaggcgaaggtggcacttgtatggtgatgcaatccttcccggcagctgcagggcacaagaggccatt

SEQ ID NO: 17620 - DNA, 119 bp, homo sapiens
cagactcagcactcaccgcttccagaggaacttgagtctacgacaccagggtcaacttcttccaggcagggaaggtgaccagacggtcaaaggacacccgggcctaggaaaaccgaagc

SEQ ID NO: 17621 - DNA, 119 bp, homo sapiens
cccaaaagccaaacctgatggtggttccttttcttggagatgaagaaattcagagggaggaggctcaggagacagcgatggcagtgagggcggagggccccaggagctggggatagaag

SEQ ID NO: 17622 - DNA, 119 bp, homo sapiens
ccccaacccttccgtgcgactttacttacccagaaacccaccagaacgtggctttggaggggaaggctgcccagtctctggacaggggttctgcaacagacaaaaatggagaagggaag

SEQ ID NO: 17623 - DNA, 119 bp, homo sapiens
tggggcgcgatggggggcactcaccccctgccccgcgcagggctcagcaggcgcggccatcggcgcctttgtcgtcgtgggtcccagcgtctgtctgtcgctaagtctctgggcagact

SEQ ID NO: 17624 - DNA, 119 bp, homo sapiens
aggggacatacctagcacattgtgaatggaactctgctggctgaacccttccagacggtccaacacactcgcatccttttctgaagggagctcgattccatgaaggccctgcagggagg

SEQ ID NO: 17625 - DNA, 119 bp, homo sapiens
agagggccaagtcactcacctggactgctgcagacagtgcaagcggaaggtgacagtgcctgtggtctcgtgcggagtccaaagcggctcaggcgttccccctgtggcatgccattggg

SEQ ID NO: 17626 - DNA, 119 bp, homo sapiens
ggttacctggagtggcaggcagcaccacagccccatagccttccacacggtacctctgccagaagtccacgagaggacctcacagtagagcacaggccactccgggagtgcatctggga

SEQ ID NO: 17627 - DNA, 119 bp, homo sapiens
caggatcaactgctgagctactcaccagaagattcatcctcatggaggaagaaggcttcaaacgtgaatggtaggagaagtgagccaccttgtcctataaaaaggagtgtcatagggtg

SEQ ID NO: 17628 - DNA, 119 bp, homo sapiens
agatacccgctctcattctccataccattgccagggacttggtggtgcaggtctgtgttactcctgagactgctggaatgctgggcttgaccagtctgaaagccaaagaccaaatatag

SEQ ID NO: 17629 - DNA, 119 bp, homo sapiens
aaggagagacttaagaatattacttacgagcagttggcaattctacaaagaagtggacgtagagattgtatactcatagccttgggctgaaactacgagagaaaacaggaagctatttt

SEQ ID NO: 17630 - DNA, 119 bp, homo sapiens
gcctaagcatcaagagatctatgctagcaagacacttaccgacctctccatttacaaagagccggagggacctgggacagtctaaggtgaagagaagtgggaaaggatcagcaggcctg

SEQ ID NO: 17631 - DNA, 119 bp, homo sapiens
ctcacagtgctgcaggaagccaagctactcaccatctcaaagtcggtgcctacgaggctgctgagatacccttgtgccggccataaagctgaggaaacaaaccaaaccaaaactcaaga

SEQ ID NO: 17632 - DNA, 119 bp, homo sapiens
gcttacatccttgaacactcgccgttcccgctcctcctcctccggctgtgcgtggggggaaacattgtcatcgtatatttccacagctcctgcttctccccctccgtctcaatcctgta

SEQ ID NO: 17633 - DNA, 119 bp, homo sapiens
ctcctcacctgtagggtcctttgaggcccgtgaagtcaggctttactgtgatcacaccattgctatccacttcagagtacacaggacatgttcatacttcttatagccaagcctagaaa

SEQ ID NO: 17634 - DNA, 119 bp, homo sapiens
cccgcactcacatccctcgcctgtcctgccggcgacgcctgacatttgccattcgctcgaccaagaatgaggcacctcgctggctgcagtggtcattctctgacagtgctgggaaaagc

SEQ ID NO: 17635 - DNA, 119 bp, homo sapiens
gagaagacaagagacactggctcacctggctaaagagcttctcctgccacccaatcacaatctcctcctttcgtcttcctctgggcggtgtccacctccaaagacaacagagtgaatca

SEQ ID NO: 17636 - DNA, 119 bp, homo sapiens
cccactggcagttggctgaggcctaaaagtggccaagtctatgaggtccttcccgagctcggcagcaggtgataatgaagaaagttgcttgatgtgattctttgcaggtggactctgtc

SEQ ID NO: 17637 - DNA, 119 bp, homo sapiens
gaggcagaggccaggacccacctttctgccaagctggaagggcaccaccgggtcgtcctcagcgtgcagatgagcaggggacaggagatgtgcttcacgctgtaggagggagaaggggc

SEQ ID NO: 17638 - DNA, 119 bp, homo sapiens
cctgtcccataatactcacttttcatcatttgcaaatttaattccactacttgtaataggatcaaggaaaaccagtcaaacccagggaagtatcgatatatctggagacaagatggaaa

SEQ ID NO: 17639 - DNA, 119 bp, homo sapiens
ttaataaaatctgtacttgccactgaaaatggatggctcttagcttcttcgcggatattagtgaatggaattccaatataagggcatctggaggcgtctctagataaacaaacagggaa

SEQ ID NO: 17640 - DNA, 119 bp, homo sapiens
gaatgctcactgccacggctggggcccaacaaggcactcacctcgctcacagaggcgccgcaccagattgtcgccacgctaggaaaaaagaaaaacagcttagttgagttatgataaaa

SEQ ID NO: 17641 - DNA, 119 bp, homo sapiens
gaattgtgctcagatgctcttgcaaaagaaatctcacctctgtagtcaaaggtgaccacatggtaaccagggaactcagcacctgtaaagtgaaaaataaacatctttggcaacaaatc

SEQ ID NO: 17642 - DNA, 119 bp, homo sapiens
gaaagaacagcccagggaacaggtgtgggtgctgcctgcactcaccttgtaaagctccacgcggtggtccctcctctggagaagaaaacaggacatggtgtgagcacatcttctcagag

SEQ ID NO: 17643 - DNA, 119 bp, homo sapiens
ctggtacctgcgttcccatgcaggtacagaatgatagggtggctggaagccaaggcatcctcataccactctggtctttgccttgggcgttcttccaccagactgcagggacggtgtgc

SEQ ID NO: 17644 - DNA, 119 bp, homo sapiens
cactcaccagactccaatggtcacgtcttcctctggctgcaggtagtagttacacgtgtgattcaaacctgatcctgtggttttttcaaatcaatgaaatagggaactcttactgtagg

SEQ ID NO: 17645 - DNA, 119 bp, homo sapiens
cactcacgttaagacgcttgctggcatcatctgggactcgggtgctgcctctatcaaggactgccaggttttgtggagttagggatcacaaagccaaactcgaagaaccattctgaagg

SEQ ID NO: 17646 - DNA, 119 bp, homo sapiens
aagggttggaaagtaccttcatgctccacaccagggacagacaggtcttctgttccttgccagagtatctccctgtctcagcatcccgaaggttcatccaatttctgatcaaatatgac

SEQ ID NO: 17647 - DNA, 119 bp, homo sapiens
tatcacttaatacctgcactactgtactgaacagattctactctgagtagaggtggtatgttgattttctcttccgggtacttcactatttctgccctgacaatacgctgtcaattcca

SEQ ID NO: 17648 - DNA, 119 bp, homo sapiens
aaatgttacctataaaataccaacctttatttttagagccacaaagcacactcgattattctctattagtgatgaaatgaaaataatgaaatggccctaagaggaaaagagttatatgg

SEQ ID NO: 17649 - DNA, 119 bp, homo sapiens
tataaagttcaaggtaatcacctgtgactgttctatttctgctttgtttaatttgatcccaaggatttcgcagcaactttctgaaagcacaggaagacctacataacaaaaatgggttt

SEQ ID NO: 17650 - DNA, 119 bp, homo sapiens
ttacttacagagtctcctgtcttggctgagacaaagtggctactaaaaccattttcctggcaaaaccgtagtgtttttcaggttttattgttcgcatatgctccaaatcaactagaaag

SEQ ID NO: 17651 - DNA, 119 bp, homo sapiens
agaattcatatcatacctgtgctccatagatatatttatccaacattttgcctcctattgtctgccctctatatcccaaatttgaagggtaacattcaagtttcctagaatataaaaaa

SEQ ID NO: 17652 - DNA, 119 bp, homo sapiens
ttagtctcttacctggcaatgttatccttctcaaaaagaaatccagtcctatagtttgtttgtactgttcccaaaagtttcttgagcaaaacacgtagttaaggaggtctaaaaaattg

SEQ ID NO: 17653 - DNA, 119 bp, homo sapiens
caatgcatctctttgcatgtctgtgcattgtccttagctttttggaaggagtgggctgtttgtgtccttacagtgcacctgtgattatcacggcagaaatgacggctcaggatcaaggt

SEQ ID NO: 17654 - DNA, 119 bp, homo sapiens
cttttctgtaggctttcaacagacctcacatctttcttcttatgaaattataactccttggagattaacagagaaagaagagaagcccctaggccctattcaaaacaagtaagttataa

SEQ ID NO: 17655 - DNA, 119 bp, homo sapiens
gttttattcttttccccttctgtgcatttaggtatcttatgttattcaggctgaaggaaaagagcatatattcacttggaaaggaacaagtaagacatttaatttattttggcttttca

SEQ ID NO: 17656 - DNA, 119 bp, homo sapiens
ggtgttttatttctcttccagagaccttttgcctgaagattttgtggtttatacttacaacaaggaaggactttaatcactgaccatcccaatatacaggtaatgtatttttctcttga

SEQ ID NO: 17657 - DNA, 119 bp, homo sapiens
taatacagtatttttcatttagaatcattgtcattatcggggctatgtggagggagttcataattcatcattgctcttagcgactgttttggactcaggtaagcaatttcctttatctt

SEQ ID NO: 17658 - DNA, 119 bp, homo sapiens
cctttatgatgtttgtgtttttgacagagaagaagagctgtcttgccacagacccggtatgtggagctgtcattgtcgtagacaaggaaagggtaagattggtgacaatttttcttctt

SEQ ID NO: 17659 - DNA, 119 bp, homo sapiens
gattctccttctttgcttttccagtatgacatgatgggaagaaatcagactgctgtgagagaagagatgttctcctggcaaactacttggatagtgtaagttgtattttctatcaacca

SEQ ID NO: 17660 - DNA, 119 bp, homo sapiens
cttttacattttcatttagaaagaaaggttttggtggaactgcaggaatggcatttgtgggaacagtgtttcaaggagccacgcaggcgggattaatgtggtacgttgttcttgatgtt

SEQ ID NO: 17661 - DNA, 119 bp, homo sapiens
ttttatgttcacaggaatgtgaattggacccttgctgcgaaggaagtacctgtaagcttaaatcatttgtgagtgtgcatatggtgactgttgtaaagactgtcgggtaaggaattcct

SEQ ID NO: 17662 - DNA, 119 bp, homo sapiens
gttacagaagccaaggctgcccccaaagattgtttcattgaagtgaattctaaaggtgacagatttggcattgtggtttctctggcaatgaatacaagaagtgtgccactgggtaagtg

SEQ ID NO: 17663 - DNA, 119 bp, homo sapiens
ttcatttttttttttttcagatctgtagaaacttccagtgtgtagatgcttctgttctgaattatgacttgatgttcagaaaaagtgtcatggacatggggtaggtaatgttttctttt

SEQ ID NO: 17664 - DNA, 119 bp, homo sapiens
tttgaaggtatgtaatagcaataagaattgtcactgtgaaaatggctgggctcccccaaattgtgagacaaaggatacggaggaagtgtggacagtggacctacatacaatggcaagta

SEQ ID NO: 17665 - DNA, 119 bp, homo sapiens
taattgtatctttcaggtcagatggcaaaaatcaagcaaacccttctagacagccggggagtgttcctcacatgtttctccagtgacacctcccagagaagttgtaagtataaaatgaa

SEQ ID NO: 17666 - DNA, 119 bp, homo sapiens
taaccttattttttttttctttttagcctatatatgcaaacagatttgcagtaccaacctatgcagccagcaacctcagcagttcccatcaaggtcagaagaaaatttgcttagatttt

SEQ ID NO: 17667 - DNA, 119 bp, homo sapiens
ctcacccgttccttaattttttcagtcaggaatggtttgatcatggaaaagacagcatggaaaattactgttcatttatcaaatggatgccacgaactttcaatggaaatgaatccttt

SEQ ID NO: 17668 - DNA, 119 bp, homo sapiens
accgtgtatgagggcgtcctctgcttggaggtgctgtcgtacgtgtccttcccgatgtcaaacttgtatatgggaggaagtggatgtccggctcctggaagcccttgaagatggaccct

SEQ ID NO: 17669 - DNA, 119 bp, homo sapiens
cctcacctgcgctggagcgataggggttggtgtcgggcacatttctgggcaggaccagggcttgtacagcctggtgtagtccagcagccgctccgccaccttcccgtcacctgctgtgg

SEQ ID NO: 17670 - DNA, 119 bp, homo sapiens
aggtgaagtgggacgtgatgaagaggaaggaagtgccaaaaaaggtgaagctgatgcccaaggccccctggtcttgatctgagacacgatgcgtgtggtcaccgtggagcactccacct

SEQ ID NO: 17671 - DNA, 119 bp, homo sapiens
agccgccctacctgtcagaacagccctcctggaccccgatgacatacaggtcctgggcatagtcggcctggctgggagcaggaactcgtccaggctgggcgggagctcctggaaggagg

SEQ ID NO: 17672 - DNA, 119 bp, homo sapiens
catggtgccttgcgcgccagcgcagccattggtccggctactctgtctctttttcaaattgaggcgccggtcgttgcttagtttctggggattcgggcggagacgagattagtgatttg

SEQ ID NO: 17673 - DNA, 119 bp, homo sapiens
gaggcgccgagtcgttgcttagtttctggggattcgggcggagacgagattagtgatttggcggctccgctggcgcgggacaaacgccacggccagagtaccgggtagagagcggggac

SEQ ID NO: 17674 - DNA, 119 bp, homo sapiens
gcggctccgactggcgcgggacaaacgccacggccagagtaccgggtagagagcggggacgccgacctggtgcgtcggtcctccaggccacgccagcgcccgagagggaccagggagac

SEQ ID NO: 17675 - DNA, 119 bp, homo sapiens
gccgacctgcgtgcgtcggtcctccaggccacgccagcgcccgagagggaccagggagactccggccccgtcggccgccaagcccctccgcccctcacagcgcccaggtccgcggccgg

SEQ ID NO: 17676 - DNA, 119 bp, homo sapiens
tccggcccctgtcggccgccaagcccctccgcccctcacagcgcccaggtccgcggccgggccttgatttttggcggggaccgtcatggcgtcgcagccaaattcgtctgcgaagaaga

SEQ ID NO: 17677 - DNA, 119 bp, homo sapiens
gccttgattttttggcggggaccgtcatggcgtcgcagccaaattcgtctgcgaagaagaaagaggagaggggaagaacatccaggtggtggtgagatgcaggtagggagagggctgac

SEQ ID NO: 17678 - DNA, 119 bp, homo sapiens
tgataacctgagaactaagagctcttgaatgactttgtgtatttctttttatagaccatttaatttggcgagcggaaagctagcgcccattcaatagtagaatgtgatcctgtacgaaa

SEQ ID NO: 17679 - DNA, 119 bp, homo sapiens
taatttggcagagcggaaagctagcgcccattcaatagtagaatgtgatcctgtacgaaaagaagttaggtacgaactggaggattggctgacaagagctcaaggaaaacatacacttt

SEQ ID NO: 17680 - DNA, 119 bp, homo sapiens
agaagttagtgtacgaactggaggattggctgacaagagctcaaggaaaacatacacttttgatatggtacatatggtgcaatttctttattatccactaatgtaaaataattttaata

SEQ ID NO: 17681 - DNA, 119 bp, homo sapiens
ttatattagtccttattataatttcaggatcccttggctggtataattccacgtacccttcatcaaattttgagaaacttactgataatggtactgaattttcagtcaaagtgtctctg

SEQ ID NO: 17682 - DNA, 119 bp, homo sapiens
ttggagatctataatgaagagctttttgatcttcttaatccatcatctgatgtttctgagagactacagtgtttgatgatccccgtaacaaggtaattcagtctttgagaatgaaatgt

SEQ ID NO: 17683 - DNA, 119 bp, homo sapiens
tgtgtgtgtgtgtgtgttttaaccaatctaatggatgttcttttggtattttggtcagagaggagtgatattaaaggtttagaagaaattacagtacacaacaaggatgaagtctatca

SEQ ID NO: 17684 - DNA, 119 bp, homo sapiens
aggagtgataattaaaggtttagaagaaattacagtacacaacaaggatgaagtctatcaaattttagaaagggggcagcaaaaaggacaactgcagctactctgatgaatgcatactc

SEQ ID NO: 17685 - DNA, 119 bp, homo sapiens
aattttagaaaagggggcagcaaaaaggacaactgcagctactctgatgaatgcatactctaggtaagaagccatagtctcttccctagccccattttcttttaagaagaattaggaac

SEQ ID NO: 17686 - DNA, 119 bp, homo sapiens
ttttatttttaaaattaaaggttgatcttgcaggaagtgaaaacattggccgttctggagctgttgatagagagctcgggaagctggaaatataaatcaatccctgttgactttgggaa

SEQ ID NO: 17687 - DNA, 119 bp, homo sapiens
ctgttgataagagagctcgggaagctggaaatataaatcaatccctgttgactttgggaagggtcattatgcccttgtagaaagaacacctcatgttccttatcgagaatctaaactaa

SEQ ID NO: 17688 - DNA, 119 bp, homo sapiens
gggtcattactgcccttgtagaaagaacacctcatgttccttatcgagaatctaaactaactagaatccccaggattctcttggagggcgtacaagaacatctataattgcaacaattt

SEQ ID NO: 17689 - DNA, 119 bp, homo sapiens
ctagaatcctccaggattctcttggagggcgtacaagaacatctataattgcaacaatttctcctgcattctcaatcttgaggtaagccctttgaaaggaagctgcaagtgtagtagct

SEQ ID NO: 17690 - DNA, 119 bp, homo sapiens
agcgttttttaaattcttatatttaggttacagagttgtttatggataataaaaatgaacttgaccagttaaatctgacctgcaaaataaaacacaagaacttgaaaccactcaaaaac

SEQ ID NO: 17691 - DNA, 119 bp, homo sapiens
atttgcaagaaactaaattacaacttgttaaagaagaatatatcacatcagctttggaaagtactgagggaaacttcatgatgctgccagcaaggtttgtcccttgtgttgatttgtac

SEQ ID NO: 17692 - DNA, 119 bp, homo sapiens
atttttaaaaatatagctgcttaacacagttgaagaaactacaaaagatgtatctggtctccattccaactggatcgtaagaaggcagttgaccaacacaatgcagaagctcaggatat

SEQ ID NO: 17693 - DNA, 119 bp, homo sapiens
ttttggcaaaaacctgaatagtctgtttaataatatggaagaattaattaaggatggcagctcaaagcaaaggccatgctagaagtacataagaccttatttggtaagttcaggctgtt

SEQ ID NO: 17694 - DNA, 119 bp, homo sapiens
aaagtttacatctttctgtttttgtttgttataggtaatctgctgtcttccagtgtctctgcattagatccattactacagtagcacttggatctctcacatctattccagaaaatgtg

SEQ ID NO: 17695 - DNA, 119 bp, homo sapiens
tctactcatgtttctcagatttttaatatgatactaaaagaacaatcattagcagcagaaagtaaaacttactacaggaattgattgttagtacatcctttaaaatatttttgaagggt

SEQ ID NO: 17696 - DNA, 119 bp, homo sapiens
gtttacagaagtggaaatattctttttaaagacctatttgtttatttctgaaaccagaatgtactcaagctgatcttctaagttcactggaaatgattttatccccaactgtggtgtct

SEQ ID NO: 17697 - DNA, 119 bp, homo sapiens
gtactcaagactgatcttctaagttcactggaaatgattttatccccaactgtggtgtctatactgaaatcaatagtcaactaaagcatattttcaagacttcattgacagtggccgat

SEQ ID NO: 17698 - DNA, 119 bp, homo sapiens
atactgaaaatcaatagtcaactaaagcatattttcaagacttcattgacagtggccgataaggtaacaatgctatgttcttaatatctcaaaattgatgtgttgtttaagaaggaaac

SEQ ID NO: 17699 - DNA, 119 bp, homo sapiens
tgtgttgtttaagaaggaaactcatttttgtttcttcaaagatagaagatcaaaaaaaggaactagatgctttctcagtatactgtgtaacaatctacatgaactacaagaaaatacca

SEQ ID NO: 17700 - DNA, 119 bp, homo sapiens
aactagatggctttctcagtatactgtgtaacaatctacatgaactacaagaaaataccatttgttcctggttgagtcacaaaagcaatgtggaaacctaactgaagacctgaagacaa

SEQ ID NO: 17701 - DNA, 119 bp, homo sapiens
tttgttccttggttgagtcacaaaagcaatgtggaaacctaactgaagacctgaagacaataaagcagaccattcccaggtatgttgtttagcggacttggggagtacagaaagagagt

SEQ ID NO: 17702 - DNA, 119 bp, homo sapiens
tttcctataggaaatctaaggatatagtcaacaaaatgacttttcacagtcaaaaattttgtgctgatttgatggcttctcacaggaactcagaaattttaaccaagaaggtacaaaat

SEQ ID NO: 17703 - DNA, 119 bp, homo sapiens
gtgctgattctgatggcttctcacaggaactcagaaattttaaccaagaaggtacaaaattggttgaagatctgtgaaacactctgataaactcaatggcaacctggaaaaaatatctc

SEQ ID NO: 17704 - DNA, 119 bp, homo sapiens
tggttgaagaatctgtgaaacactctgataaactcaatggcaacctggaaaaaatatctcaagagactgacagagatgtgaatctctgaacacaagaacagtttatttttctgaacagt

SEQ ID NO: 17705 - DNA, 119 bp, homo sapiens
aagagactgaacagagatgtgaatctctgaacacaagaacagtttatttttctgaacagtgggtatcttcttaaatgaaagggaacaggaacttcacaacttattggaggtaataactt

SEQ ID NO: 17706 - DNA, 119 bp, homo sapiens
catttacaggttgtaagccaatgttgtgaggcttcaagttcagacatcactgagaaatcagatggacgtaggcagctcatgagaaacagcataacatttttcttgatcagatgactatt

SEQ ID NO: 17707 - DNA, 119 bp, homo sapiens
gatgaagataaattgatagcacaaaatctagaacttaatgaaaccataaaaattggtttgactaagcttattgctttctggaacaggatctgaaactggatatcccaacaggtacttta

SEQ ID NO: 17708 - DNA, 119 bp, homo sapiens
atctcatactttaatttttacctcttatctaatgtccgttaaaggtacgacaccacagaggaaaagttattatacccatcaacactggtaagaactgaaccacgtgaacatctccttga

SEQ ID NO: 17709 - DNA, 119 bp, homo sapiens
gaaaagttatttatacccatcaacactggtaagaactgaaccacgtgaacatctccttgatcagctgaaaggaaacagcctgagctgttaatgatgctaaactgttcagaaaacaacaa

SEQ ID NO: 17710 - DNA, 119 bp, homo sapiens
tcagctgaaaaggaaacagcctgagctgttaatgatgctaaactgttcagaaaacaacaaagaagagacattccggtaaatttaaaggatcatattttataatagaactcttttatgaa

SEQ ID NO: 17711 - DNA, 119 bp, homo sapiens
gcataaaaaatcacatggaaaagacaaagaaaacagaggcattaacacactggagaggtctaaagtggagaaactacagagcacttggttacaaagagcagattacctctgcgagccca

SEQ ID NO: 17712 - DNA, 119 bp, homo sapiens
taaagtggaagaaactacagagcacttggttacaaagagcagattacctctgcgagcccagatcaaccttaattcacttgggggttggcaattttatttttaaagaaaacttaaaaata

SEQ ID NO: 17713 - DNA, 119 bp, homo sapiens
gatcaacctttaattcacttgggggttggcaattttatttttaaagaaaacttaaaaataaaacctgaaccccagaacttgagccttgtgtatagattttaaaagaatatatatatcag

SEQ ID NO: 17714 - DNA, 119 bp, homo sapiens
aaaaacaaaatttaaaaaagatataaggcagtactgtaaattcagttgaattttgatatctacccattttctgtcatccctatagttcactttgtattaaattgggtttcatttgggat

SEQ ID NO: 17715 - DNA, 119 bp, homo sapiens
tacccatttttctgtcatccctatagttcactttgtattaaattgggtttcatttgggatttgcaatgtaatacgtatttctagttttcatataaagtagttcttttataacaaatgaa

SEQ ID NO: 17716 - DNA, 119 bp, homo sapiens
ttgcaatgtaaatacgtatttctagttttcatataaagtagttcttttataacaaatgaaaagtattttcttgtatattattaagtaatgaatatataagaactgtactcttctcagct

SEQ ID NO: 17717 - DNA, 119 bp, homo sapiens
aagtatttttcttgtatattattaagtaatgaatatataagaactgtactcttctcagcttgagcttactaggtaaatatcaccaacatctgtccttagaaaggaccatctcatgtttt

SEQ ID NO: 17718 - DNA, 119 bp, homo sapiens
tgagcttacataggtaaatatcaccaacatctgtccttagaaaggaccatctcatgttttttttcttgcatgacttgtgtattttcttgcatcctccctagacttccctatttcgcttt

SEQ ID NO: 17719 - DNA, 119 bp, homo sapiens
ttttcttgctatgacttgtgtattttcttgcatcctccctagacttccctatttcgctttctcctcggccactttctccctttttatttttcaccaaaccatttgtagagctacaaaag

SEQ ID NO: 17720 - DNA, 119 bp, homo sapiens
ctcctcggctcactttctccctttttatttttcaccaaaccatttgtagagctacaaaaggtatcctttttattttcagtagtcagaattttatctagaaatcttttaacaccttttta

SEQ ID NO: 17721 - DNA, 119 bp, homo sapiens
gtatcctttcttattttcagtagtcagaattttatctagaaatcttttaacacctttttagtggttattctaaaatcactgtcaacaataaatctaaccctagttgtatccctcctttc

SEQ ID NO: 17722 - DNA, 119 bp, homo sapiens
gtggttatttctaaaatcactgtcaacaataaatctaaccctagttgtatccctcctttcagtatttttacttgttgccccaaatgtgaaagcatttcattcctttaagaggcctaact

SEQ ID NO: 17723 - DNA, 119 bp, homo sapiens
agtatttttcacttgttgccccaaatgtgaaagcatttcattcctttaagaggcctaactcattcacccgacagagttcacaaaaagcccacttaagagtatacattgctattatggga

SEQ ID NO: 17724 - DNA, 119 bp, homo sapiens
cattcaccctgacagagttcacaaaaagcccacttaagagtatacattgctattatgggagaccacccaacatctgactaatggctctgtgcccacactccaagacctgtgccttttag

SEQ ID NO: 17725 - DNA, 119 bp, homo sapiens
gaccacccagacatctgactaatggctctgtgcccacactccaagacctgtgccttttagagaagctcaaatgatttaaggactgtttgaaacttccaattatgtctataatttatatt

SEQ ID NO: 17726 - DNA, 119 bp, homo sapiens
agaagctcacaatgatttaaggactgtttgaaacttccaattatgtctataatttatattcttttgtttcatgatgaaactttttgttgttgcttgtttgtatataatacaatgtgtac

SEQ ID NO: 17727 - DNA, 119 bp, homo sapiens
cttttgtttacatgatgaaactttttgttgttgcttgtttgtatataatacaatgtgtacatgtatcttttctcgattcaaatcttaacccttaggactctggtatttttgatctggca

SEQ ID NO: 17728 - DNA, 119 bp, homo sapiens
atgtatctttttctcgattcaaatcttaacccttaggactctggtatttttgatctggcaaccatattttggaagttgagatgtttcagcttgaagaaccaaaacagaaggaatatgta

SEQ ID NO: 17729 - DNA, 119 bp, homo sapiens
accatatttctggaagttgagatgtttcagcttgaagaaccaaaacagaaggaatatgtacaaagaataattttctgctcacgatgagtttagtgtgtaaagtttagagacatctgact

SEQ ID NO: 17730 - DNA, 119 bp, homo sapiens
caaagaataaattttctgctcacgatgagtttagtgtgtaaagtttagagacatctgactttgatagctaattaaaccaaaccctattgaagaattgaatatatgctacttcaagaaac

SEQ ID NO: 17731 - DNA, 119 bp, homo sapiens
ttgatagctaaattaaaccaaaccctattgaagaattgaatatatgctacttcaagaaactaaattgattcgtagaattatcttaataaaataatggctataatttctctgcaaaatca

SEQ ID NO: 17732 - DNA, 119 bp, homo sapiens
taaattgatctcgtagaattatcttaataaaataatggctataatttctctgcaaaatcagatgtcagctaagcgatggataatacctaataaactgccctcagtaaatccatggttaa

SEQ ID NO: 17733 - DNA, 119 bp, homo sapiens
gatgtcagcataagcgatggataatacctaataaactgccctcagtaaatccatggttaataaatgtggttctacattaacctgcttgctccataatttcttatctggcaatgggtata

SEQ ID NO: 17734 - DNA, 119 bp, homo sapiens
cggccccgcccgcccccgcgcggaggactgtgggagcggcttccttggattccgcgcttggcaacggctggcgtcgcgctttggccaaccgctgcgtcgtccctgggcccgaataactg

SEQ ID NO: 17735 - DNA, 119 bp, homo sapiens
gcaacggctcggcgtcgcgctttggccaaccgctgcgtcgtccctgggcccgaataactgtcgcccgctccctcagcgtgaggtaggagaagggcgctggggcctagtgcctcagggcc

SEQ ID NO: 17736 - DNA, 119 bp, homo sapiens
tcgcccgcttccctcagcgtgaggtaggagaagggcgctggggcctagtgcctcagggcccctggcagcgtgcccctgcggcgtcctgtgtggcgcatcccgccgagggcctcttcgcc

SEQ ID NO: 17737 - DNA, 119 bp, homo sapiens
ttttaggattaaaataatgcagaatattggagttacatttattcaggctggtcagtattcagatgctataattcatatgagcacataatgagcatggcaccaaatctgaaggcaggcta

SEQ ID NO: 17738 - DNA, 119 bp, homo sapiens
caacctaactatctgttattttgctattggagaccgagaaaaaatgaagaaggcattccaaaaattgatactgttccattagaaattgatgaagataaatatatttcaccaagtgtgag

SEQ ID NO: 17739 - DNA, 119 bp, homo sapiens
aataatttgtatatgtattttacttagggaaaggattttgcacaagccagcagctatgcagatatagcttgaactctgatagatataatccagcagctcttactaataaagggaataca

SEQ ID NO: 17740 - DNA, 119 bp, homo sapiens
gtttttgcaaatggtgattatgagaaggccgctgaattctataaagaggctctaagaaatgattcttctgtactgaagcactttataatattggtaagtgaaacaaggggaaattgctt

SEQ ID NO: 17741 - DNA, 119 bp, homo sapiens
taatgaatttagaaaacatgttttccttaactgacattgcataagatatgaattaatggaaaatcccagcaagctattgaatggctaatgcaggtggtcagtgttattccaaccgatcc

SEQ ID NO: 17742 - DNA, 119 bp, homo sapiens
aaatcccagtcaagctattgaatggctaatgcaggtggtcagtgttattccaaccgatcctcaagtttttctaagctaggagaattatatgatcgtgaaggagataaatctcaagcatt

SEQ ID NO: 17743 - DNA, 119 bp, homo sapiens
tcaagttttatctaagctaggagaattatatgatcgtgaaggagataaatctcaagcatttcaatattatatgaggtaggtgtgttatcttaatttccttctgtgttttagcattttat

SEQ ID NO: 17744 - DNA, 119 bp, homo sapiens
ctagatgcctcctatgtggacccacttggccctcaaatagaacgaccaaaaactgcagccaagaaaaggtcgatgaggatgattttgctgatgaagaattaggagatgatttgcttcca

SEQ ID NO: 17745 - DNA, 119 bp, homo sapiens
aagaaaaggatcgatgaggatgattttgctgatgaagaattaggagatgatttgcttccagaataatatcactttaatatttattaaaggaaagaaattgccttatgagatcatcctca

SEQ ID NO: 17746 - DNA, 119 bp, homo sapiens
gaataatattcactttaatatttattaaaggaaagaaattgccttatgagatcatcctcatgttaaacctggattaaatatctaacctgtaattattttttttcactgtcaaaacttaa

SEQ ID NO: 17747 - DNA, 119 bp, homo sapiens
tgttaaaccttggattaaatatctaacctgtaattattttttttcactgtcaaaacttaagtaagtgtatctattctgtatgtatgcatttaagttgtttttttcttttaaggaataaa

SEQ ID NO: 17748 - DNA, 119 bp, homo sapiens
gtaagtgtattctattctgtatgtatgcatttaagttgtttttttcttttaaggaataaaaacaggtaaactaatactttaggccagtgacttccttagctttttgaaaacattgacac

SEQ ID NO: 17749 - DNA, 119 bp, homo sapiens
cccgccccgcctcccaggggatgtgcgagcagtctccgccctcgcgcgggagctgggaggctgcgagatcctaccgcagtagccgcctctgccgccgcggagcttcccgaacctcttca

SEQ ID NO: 17750 - DNA, 119 bp, homo sapiens
ctgcgagatccctaccgcagtagccgcctctgccgccgcggagcttcccgaacctcttcagccgcccgggccgctcccggagcccggccgtagaggctgcaatcgcagccgggagcccg

SEQ ID NO: 17751 - DNA, 119 bp, homo sapiens
gccgcccggagccgctcccggagcccggccgtagaggctgcaatcgcagccgggagcccgcagcccgcgcccgagcccgccgccgcccttcgagggcgccccaggccgcgccatggtga

SEQ ID NO: 17752 - DNA, 119 bp, homo sapiens
cagcccgcgccccgagcccgccgccgcccttcgagggcgccccaggccgcgccatggtgaaggtgacgtcaactccgctctggcccagaaggaggccaagaaggacgagcccaagagcg

SEQ ID NO: 17753 - DNA, 119 bp, homo sapiens
aggtgacgttcaactccgctctggcccagaaggaggccaagaaggacgagcccaagagcggcgaggagggctcatcatcccccccgacgccgtcgcggtggactgcaaggtccgagccc

SEQ ID NO: 17754 - DNA, 119 bp, homo sapiens
gccttctgttattctgtctggagataagatatttaactgtctttttcatattttaggacccagatgatgggtaccagttggccaaagaagagcctggtgttggtgcatgtgctttggac

SEQ ID NO: 17755 - DNA, 119 bp, homo sapiens
cagatgatgtggtaccagttggccaaagaagagcctggtgttggtgcatgtgctttggactagcatttagcttgcaggtgttattctaggaggagcatacttgtacaaatattttgcac

SEQ ID NO: 17756 - DNA, 119 bp, homo sapiens
tagcatttatgcttgcaggtgttattctaggaggagcatacttgtacaaatattttgcacttcaagtaatggaaaaattattttgtgtctctgatttttttttttttttgcctctcccg

SEQ ID NO: 17757 - DNA, 119 bp, homo sapiens
ctttaaactctctatagccagatgacgtgtactactgtggaataaagtacatcaaagatgatgtcatctaaatgagccctctgcagatgccccagctgctctctaccagacaattgaag

SEQ ID NO: 17758 - DNA, 119 bp, homo sapiens
atgtcatcttaaatgagccctctgcagatgccccagctgctctctaccagacaattgaagaaaatattaaatctttgaagaagaagaagttgaatttatcagtgtgcctgtcccagagt

SEQ ID NO: 17759 - DNA, 119 bp, homo sapiens
aaaatattaaaatctttgaagaagaagaagttgaatttatcagtgtgcctgtcccagagtttgcagatatgatcctgccaacattgttcatgactttaacaaggtgagccaagtgtcca

SEQ ID NO: 17760 - DNA, 119 bp, homo sapiens
gtatgttctgagatagtcatgtcatgtattcttttctgaatgtaggctggaacctatttgcctcagtccatctgattcatgagcacatggttattactgatcgcattgaaaacattgat

SEQ ID NO: 17761 - DNA, 119 bp, homo sapiens
cctcagtcctatctgattcatgagcacatggttattactgatcgcattgaaaacattgatcacctgggttctttatttatcgactgtgtcatgacaaggaaacttacaaactgcaacgc

SEQ ID NO: 17762 - DNA, 119 bp, homo sapiens
cacctgggtttctttatttatcgactgtgtcatgacaaggaaacttacaaactgcaacgcagagaaactttaaaggtaatactttttaaatattaaagtgttgggcagaaaagttcatt

SEQ ID NO: 17763 - DNA, 119 bp, homo sapiens
ggtattcagaaacgtgaagccagcaattgtttcgcaattcggcattttgaaaacaaatttgccgtggaactttaatttgttcttgaacagtcaagaaaaacattattgaggaaaattaa

SEQ ID NO: 17764 - DNA, 119 bp, homo sapiens
gccgtggaaactttaatttgttcttgaacagtcaagaaaaacattattgaggaaaattaatatcacagctaaccccaccctttacattttgtgcagtgattattttttaaagtcttctt

SEQ ID NO: 17765 - DNA, 119 bp, homo sapiens
tatcacagcataaccccaccctttacattttgtgcagtgattattttttaaagtcttctttcatgtaagagcaaacagggctttactatcttttcatctcattaattcaattaaaacca

SEQ ID NO: 17766 - DNA, 119 bp, homo sapiens
tcatgtaagtagcaaacagggctttactatcttttcatctcattaattcaattaaaaccattaccttaaatttttttctttcgaagtgtggtgtcttttatatttgaattagtaactgt

SEQ ID NO: 17767 - DNA, 119 bp, homo sapiens
ttaccttaaaatttttttctttcgaagtgtggtgtcttttatatttgaattagtaactgtatgaagtcaagataatagtacatgtcaccttaggtagtaggaagaattacaatttcttt

SEQ ID NO: 17768 - DNA, 119 bp, homo sapiens
atgaagtcatagataatagtacatgtcaccttaggtagtaggaagaattacaatttctttaaatcattttctggatttttatgttttattagcattttcaagaagacggattatctaga

SEQ ID NO: 17769 - DNA, 119 bp, homo sapiens
aaatcatttatctggatttttatgttttattagcattttcaagaagacggattatctagagaataatcaatatatgcatacgtaaaaatggaccacagtgacttatttgtagttgttag

SEQ ID NO: 17770 - DNA, 119 bp, homo sapiens
gaataatcatatatatgcatacgtaaaaatggaccacagtgacttatttgtagttgttagttgccctgcacctagtttgttagtgcatttgagcacacattttaattttcctctaatta

SEQ ID NO: 17771 - DNA, 119 bp, homo sapiens
ttgccctgctacctagtttgttagtgcatttgagcacacattttaattttcctctaattaaaatgtgcatattttcagtgtcaaatatatttaactatttagagaatgatttccacctt

SEQ ID NO: 17772 - DNA, 119 bp, homo sapiens
aaatgtgcagtattttcagtgtcaaatatatttaactatttagagaatgatttccacctttatgttttatatcctaggcatctgctgtaataatattttagaaaatgtttggaatttaa

SEQ ID NO: 17773 - DNA, 119 bp, homo sapiens
tatgttttaatatcctaggcatctgctgtaataatattttagaaaatgtttggaatttaagaaataactgtgttactaatttgtataacccatatctgtgcaatggaatataaatatca

SEQ ID NO: 17774 - DNA, 119 bp, homo sapiens
gaaataacttgtgttactaatttgtataacccatatctgtgcaatggaatataaatatcacaaagttgttaactagactgcgtgttgtttttcccgtataataaaaccaaagaatagtt

SEQ ID NO: 17775 - DNA, 119 bp, homo sapiens
caaagttgtttaactagactgcgtgttgtttttcccgtataataaaaccaaagaatagtttggttcttcaatcttaagagaatccacataaaagaagaaactattttttaaaaattcac

SEQ ID NO: 17776 - DNA, 119 bp, homo sapiens
tggttcttcaaatcttaagagaatccacataaaagaagaaactattttttaaaaattcacttctatataacaatgagtaaaatcacagattttttctttaaataaaaataagtcatttt

SEQ ID NO: 17777 - DNA, 119 bp, homo sapiens
ttctatatatacaatgagtaaaatcacagattttttctttaaataaaaataagtcattttaataactaaccagattctttgtggatactattaaagtaacatttaagcctcaaccttga

SEQ ID NO: 17778 - DNA, 119 bp, homo sapiens
gtggggcgggatgggacagggcacgggctctcagaaaataaactgctttattggaattacaggagtgttgtggccggtgggcagagcctagcagggggtgcagccgccaaggcccgggt

SEQ ID NO: 17779 - DNA, 119 bp, homo sapiens
aggagtgttggtggccggtgggcagagcctagcagggggtgcagccgccaaggcccgggtgtcccagctttgctcaggagccgtgggccctgcaggagtatggggaggatatgatgtgt

SEQ ID NO: 17780 - DNA, 119 bp, homo sapiens
gtcccagctgttgctcaggagccgtgggccctgcaggagtatggggaggatatgatgtgtggggagcagggggcaggtgccccagccctccagctgcagcttcctgaggttctagaagt

SEQ ID NO: 17781 - DNA, 119 bp, homo sapiens
ggggagcaggggggcaggtgccccagccctccagctgcagcttcctgaggttctagaagtttctcaggcttacaatgtgtagttgggagaatacgatggaagggtgaacccgactccct

SEQ ID NO: 17782 - DNA, 119 bp, homo sapiens
ttctcaggctttacaatgtgtagttgggagaatacgatggaagggtgaacccgactcccttcaaaggaagaatccaaaaatctagtggagctgccgggcacccagaggcaggtgggaca

SEQ ID NO: 17783 - DNA, 119 bp, homo sapiens
tcaaaggaatgaatccaaaaatctagtggagctgccgggcacccagaggcaggtgggacagagcaaggtcagacgggtcacaccctccgccggcccgggccgctgcgttctcgcccagc

SEQ ID NO: 17784 - DNA, 119 bp, homo sapiens
gagcaaggtgcagacgggtcacaccctccgccggcccgggccgctgcgttctcgcccagctctgtcgcgattccaacacagacatgttttttcccagcaaaaatgctggctttgccaca

SEQ ID NO: 17785 - DNA, 119 bp, homo sapiens
tctgtcgcgtattccaacacagacatgttttttcccagcaaaaatgctggctttgccacagctgacaaaaaattccagaagatgcctttctgcagcagcacgctggtcctggggcccag

SEQ ID NO: 17786 - DNA, 119 bp, homo sapiens
gctgacaaaaaaattccagaagatgcctttctgcagcagcacgctggtcctggggcccaggcccctcagggtcgtcatctgcctcttccaccacctcctcgtccagctccctggcgtcc

SEQ ID NO: 17787 - DNA, 119 bp, homo sapiens
gcccctcaggggtcgtcatctgcctcttccaccacctcctcgtccagctccctggcgtcctccatgctgtgtggcggacctgctcggggacggtgcgtggcagtgggagacccagcccc

SEQ ID NO: 17788 - DNA, 119 bp, homo sapiens
tccatgctgttgtggcggacctgctcggggacggtgcgtggcagtgggagacccagcccccggtgcacgcgtccacggcctgcgggctcacgtagtaggacatgttggccaagggaagc

SEQ ID NO: 17789 - DNA, 119 bp, homo sapiens
cggtgcacggcgtccacggcctgcgggctcacgtagtaggacatgttggccaagggaagccgccgccgctctcctccaggaatctgtaggcctggggcagaggagcagacattactcag

SEQ ID NO: 17790 - DNA, 119 bp, homo sapiens
ggagccttgtgtggcgggatgctgctagtgagcagcactcaggcctcaccgtctggtattcctccttcccacgtagtgctccaccaggaagccatagacgtccccgatgcggatggtgc

SEQ ID NO: 17791 - DNA, 119 bp, homo sapiens
cctccttccgcacgtagtgctccaccaggaagccatagacgtccccgatgcggatggtgctgtccaggttggttcctccaggagcagctcacactgcttgatggactccttggggtcct

SEQ ID NO: 17792 - DNA, 119 bp, homo sapiens
tgtccaggtctggttcctccaggagcagctcacactgcttgatggactccttggggtcctctgtgtacgcctgccgagagcagagatgaggcctgggccccgaagccctgaacacctac

SEQ ID NO: 17793 - DNA, 119 bp, homo sapiens
ctgccctggcctgtccccgctggccccgggggcacacctgcgggcctggatgaacctcttcaccagtgcatcctgctctgcagctgcgccagcctggtctcctggtccagggggctctt

SEQ ID NO: 17794 - DNA, 119 bp, homo sapiens
caccagtgccatcctgctctgcagctgcgccagcctggtctcctggtccagggggctcttggccttggcttggccaggcacttgtaggcctcggtcagcgccccgtgggctttgtcgta

SEQ ID NO: 17795 - DNA, 119 bp, homo sapiens
ggccttggccttggccaggcacttgtaggcctcggtcagcgccccgtgggctttgtcgtagttctggtatcatcaatctccacctgtacagatgaaacccgtcaagacctgccgggctc

SEQ ID NO: 17796 - DNA, 119 bp, homo sapiens
gggagggcctgcacctgggcacaagcgtcataaaagccagccaggaggtccagggcccgccccttggtgagaagccgatgatgttcttcatgatctccggctccttccgccagtccagg

SEQ ID NO: 17797 - DNA, 119 bp, homo sapiens
gactgcaggtagttagcagccatgatgtagatttccttctgcctggacacgctcgcgaagaacgtgatttctccgtgtctccggatttgagcagcgccctcatggcctaggcagagaga

SEQ ID NO: 17798 - DNA, 119 bp, homo sapiens
ggccgggagaggctcaccttcagcttgttgccggcctgcgtgtacttcttggtggccaggtggtagctgcctggcgcatgcagcagtctgctatctgctccagcagctcccgccgcgac

SEQ ID NO: 17799 - DNA, 119 bp, homo sapiens
tcctcaggcaggtccgaggagtccttggccacggtcatcttttccgccatctcctcggtgatgctcatgtctgccccaggcacagctgcagggcttcctgatactgcaaaggtgcagaa

SEQ ID NO: 17800 - DNA, 119 bp, homo sapiens
gccgagcccaggccccgctggccccgtaccttcctggcagccagcagcagctctaccgccctctcgtacgactgtgctcgatgaagaagtcggagcagcgggccaggagcgcagggtct

SEQ ID NO: 17801 - DNA, 119 bp, homo sapiens
gacgtctcatccaggtcctctgctatgagctgtagggccacaaactgctgggtggcaaaggccagctccgggccttggagaagtggccagcctgcggatacggtgggctctgagcagct

SEQ ID NO: 17802 - DNA, 119 bp, homo sapiens
agggccccctggcttgctgcccctcccccaggtccccaccggtggccagccctcaccttgtggtacagctgaccgccctgtccatctgcacgcccttctcctcgtagtatcgggccgcc

SEQ ID NO: 17803 - DNA, 119 bp, homo sapiens
tggtacagcatgaccgccctgtccatctgcacgcccttctcctcgtagtatcgggccgcctcgatcatgcctcgggggagctcagcagggccaagttcatgagctggtcgtccaggccg

SEQ ID NO: 17804 - DNA, 119 bp, homo sapiens
tcgatcatgtcctcgggggagctcagcagggccaagttcatgagctggtcgtccaggccgttctcctgcgggagggaggcagggccctgaagcggctcccactggcttccccaggtccg

SEQ ID NO: 17805 - DNA, 119 bp, homo sapiens
tcaggggacctcgagaagcgccggctccccaccccgggcccgtggtaccttgcacaggcggatggcattttgaaggcctgtgcccgggtgtagaagtgcaccgcctgcccgacctcctc

SEQ ID NO: 17806 - DNA, 119 bp, homo sapiens
gatggcattcttgaaggcctgtgcccgggtgtagaagtgcaccgcctgcccgacctcctcctggctctctactggcgggcgaggtggtaggaggccgccaggtttcctgtctcgttggc

SEQ ID NO: 17807 - DNA, 119 bp, homo sapiens
ctggctctcgtactggcgggcgaggtggtaggaggccgccaggtttcctgtctcgttggctatttgcgcgcctagaaagacaaagaacccaaagacgagacacggtggccttgtgtctg

SEQ ID NO: 17808 - DNA, 119 bp, homo sapiens
tggccttgtgtctgcctcgtgtccgcctggccggctcccctgcggggaccttaccttctggacattgcctggaagcagtggatgcggaccagggagaagtggtcccgggccagctcgta

SEQ ID NO: 17809 - DNA, 119 bp, homo sapiens
gacattgccctggaagcagtggatgcggaccagggagaagtggtcccgggccagctcgtagtagtgcaggcggcgtccatctcgccctggctctccaggtactgcgcccaccaccgcca

SEQ ID NO: 17810 - DNA, 119 bp, homo sapiens
gtagtgcagcgcggcgtccatctcgccctggctctccaggtactgcgcccaccaccgccacagggtcctcgggcagcccaagaccatggattctccacccgagccccgctccaacccgg

SEQ ID NO: 17811 - DNA, 119 bp, homo sapiens
aagaggccgcgagggccgcactcactaactgagggcccggctgcagtcggcgctggcctccaggtgcccgcatagcggtggtaggtgctgcgcaggtgcacgcgatcgtggtgctcggc

SEQ ID NO: 17812 - DNA, 119 bp, homo sapiens
tacctggagggcctcctgccaccggcccgcagcctggtagaacttgttcaggaggtcgtggcgcttgcattcctgtacagctgctcggcgtcctcctgaggaatgaggatgggcaggtg

SEQ ID NO: 17813 - DNA, 119 bp, homo sapiens
tcccacccaccccatggcgggcgcccctcaccagcatgcccagctgcgtggccagcacggccacgcgggctctagctccggctcctgctccgcctcacgcagcgctcgggccccgcggg

SEQ ID NO: 17814 - DNA, 119 bp, homo sapiens
catggcccatgttccccaggcacaccttggccacgtccagccgctgggtcttcacgcacatgcgcgccagttctcccagacggcctcactgtgggcagacgggggtctgtgaggctcct

SEQ ID NO: 17815 - DNA, 119 bp, homo sapiens
ccagtggtcgggatcctcaccttttgatgagcttgatggatttgaaggcttcgtccatgtctcctatgggacaaagaagctgaagtggagcatggcgtcccgggtggccttgtcgcagt

SEQ ID NO: 17816 - DNA, 119 bp, homo sapiens
cctccagccccacaaagtctcgcaggggtctcctggacaccatctgagggatgtggtggcacccaggctcacctcgtcttctctgtctgcttcttcgggctaaatgacaaaggacccat

SEQ ID NO: 17817 - DNA, 119 bp, homo sapiens
gccaggcaaggggagagatcagaagacacctgtgcggatgtcgtggcttcgtacctttcttgtgaagtataataaggcacttccatccccaggagactgtgggaggtggcaggccgggg

SEQ ID NO: 17818 - DNA, 119 bp, homo sapiens
tgtgaagtagtaataaggcacttccatccccaggagactgtgggaggtggcaggccgggggaagctctctgaagcaggaagccgtgctcttcggaaatgaagaaggacaggatcaaaac

SEQ ID NO: 17819 - DNA, 119 bp, homo sapiens
gaagctctcatgaagcaggaagccgtgctcttcggaaatgaagaaggacaggatcaaaacatctgcctggagagaaagaaaagtactgttctgtttttttttttaacttacataaattt

SEQ ID NO: 17820 - DNA, 119 bp, homo sapiens
agtgtgtctaaactcaaatacaacaggcagagcgtaccgcagggccagcgcgcccatcttggggctgccgtttgcagactgaggctgggagcgcggcgtctcctgcacggcttcgcata

SEQ ID NO: 17821 - DNA, 119 bp, homo sapiens
ggggctgcccgtttgcagactgaggctgggagcgcggcgtctcctgcacggcttcgcatacaaacagccgggctcactctggtcccagaagtggttcacgggaacataatttttcagtc

SEQ ID NO: 17822 - DNA, 119 bp, homo sapiens
caaacagccggggctcactctggtcccagaagtggttcacgggaacataatttttcagtccctcatccaaaagaggtggctcctaaaagacaaaggaagacccgtttcaaccccagggc

SEQ ID NO: 17823 - DNA, 119 bp, homo sapiens
agaagtaactgaacatcattttttccaacaaaatcctcctgaaccacaatcttacttattagtctcttgtcattaaaggacagcgtctctctccgatcaatttgtccagtcttgaagtc

SEQ ID NO: 17824 - DNA, 119 bp, homo sapiens
agtctcttgctcattaaaggacagcgtctctctccgatcaatttgtccagtcttgaagtcaaagacggtactgtgtccatttcaacatcgtagaagcagattttggaatcagggctgtt

SEQ ID NO: 17825 - DNA, 119 bp, homo sapiens
aaagacggtcactgtgtccatttcaacatcgtagaagcagattttggaatcagggctgttgtcagcctagagaagagaaaaccagaaagctcacggagcctgcccagaccagcgggttg

SEQ ID NO: 17826 - DNA, 119 bp, homo sapiens
ctgtctcctgactgactaaaaaaatgttcacacttctatttggaaaaaaaatttaccttcgggaaagataaagcttttaaagtgagccaagtctgtccctacaaccaggaaattcccac

SEQ ID NO: 17827 - DNA, 119 bp, homo sapiens
gggaaagatcaaagcttttaaagtgagccaagtctgtccctacaaccaggaaattcccacagatgtccagaagcagggattcccctcagtctccgagaaaaggaggagttgtttgacag

SEQ ID NO: 17828 - DNA, 119 bp, homo sapiens
agatgtccaagaagcagggattcccctcagtctccgagaaaaggaggagttgtttgacagtcccctgagaaaaggaacaagaaatggatatatttcatgttagttactgaacattgttc

SEQ ID NO: 17829 - DNA, 119 bp, homo sapiens
ggtcccctcggcagtcaccttggtggcaaacactccactgatgtgcatgtcggtgcgcaggctgtgtgcacccccgtggacaggaagcacacattcagcagactcggggagacctgcat

SEQ ID NO: 17830 - DNA, 119 bp, homo sapiens
ggcggccacttgctggtggaagtgtgacgacatggcccgctcgctgaggatggccacggagatgacgctttcactgccagcaggttcttcctggaaccccacttcatttccaggttgca

SEQ ID NO: 17831 - DNA, 119 bp, homo sapiens
ttcatgcagcagaaaatgagtgcaccgaacacccttggaggctgtacctggatttgcgtgatgtttcctggagctcggtaggggtctgaagggcccacctgtccttgccctctgccccg

SEQ ID NO: 17832 - DNA, 119 bp, homo sapiens
atgtttccttggagctcggtaggggtctgaagggcccacctgtccttgccctctgccccggggctgcccggaagtctggtactttcctccacatggctactcgccctctgtcggtacca

SEQ ID NO: 17833 - DNA, 119 bp, homo sapiens
gggctgcccaggaagtctggtactttcctccacatggctactcgccctctgtcggtaccagcggccagagacctacaggtagaaacaaactgcatgtgaacagagttaaaaaaagggaa

SEQ ID NO: 17834 - DNA, 119 bp, homo sapiens
cagcgtgagcccccaagcccactcccactcaccttcatcacttcttctgctttgccctcaggaggcacctgtacagggacagccggaggttctctgtgaccaccaccagtgcctccctc

SEQ ID NO: 17835 - DNA, 119 bp, homo sapiens
ttctccatgtagaacagcatctgaatcgtgctgtctgcggacaccacctgagtggtcttgcccttctcaccacatagtgcactgtccctggggacaaacgtggggtcactacatgagga

SEQ ID NO: 17836 - DNA, 119 bp, homo sapiens
cacccctaaaatgctaggacccctgagaatcacaaccaaagttcctcaccgtccatcagactgacaaagacaacagcccctcgtgagaccccatcttcagcaaacttccagaactgctc

SEQ ID NO: 17837 - DNA, 119 bp, homo sapiens
ctgacaaagaacaacagcccctcgtgagaccccatcttcagcaaacttccagaactgctcttcttccagtaaacatgtccagggctttctcatcaccgctcacagctgcctttgccaac

SEQ ID NO: 17838 - DNA, 119 bp, homo sapiens
ttcttccagttaaacatgtccagggctttctcatcaccgctcacagctgcctttgccaactgaaccaggccctgaaagcaaacacgacacgaagcaagattcttctgccactcctacag

SEQ ID NO: 17839 - DNA, 119 bp, homo sapiens
cttcccacctcccccgatgtaaacacacacacaggtcacagggcaagccccacacttactcgccaggagggggagccggaagatgcagtgcgtgaggtgtttcccatactcgtgtttca

SEQ ID NO: 17840 - DNA, 119 bp, homo sapiens
cgccaggaggggggagccggaagatgcagtgcgtgaggtgtttcccatactcgtgtttcagcagaggcgcccttgcactcggcccctttggtccaacctccacaagagcaagacaccaa

SEQ ID NO: 17841 - DNA, 119 bp, homo sapiens
gcagaggcgtcccttgcactcggcccctttggtccaacctccacaagagcaagacaccaagctggaaagcccaacaccacgtgttaggacaggtgtcccggcagagcgactggtggagg

SEQ ID NO: 17842 - DNA, 119 bp, homo sapiens
ttgactcaccctgtccccagacagcaggcagtttccactggggctccaacggagcacggtgatgtcggcgtgtgtgtcaggggcatcgtgtgctgctccttgtcctgcttgttaaacac

SEQ ID NO: 17843 - DNA, 119 bp, homo sapiens
cgtcacttctccagtctcccagcccacagccagcaccagccgcgtcgggtgccagcacagggaagcaaccggaacggcctctcgacgtgtgtatctggcacgcactccccctgcattgg

SEQ ID NO: 17844 - DNA, 119 bp, homo sapiens
acagtcaggctccttgcttctgagcactcacttgctccaggtaaatatccacgctgcctgttgaggttggctgatgtaagcaactgccaagaatggatggacagggtgccagctgataa

SEQ ID NO: 17845 - DNA, 119 bp, homo sapiens
atgagggtgaccctgctgcatccggggcttctatctggtggtcataatagagggccatgacggaactcagcctcctcagcgctgaaacctgcagggaaaaaaaaatgaccaagtccaat

SEQ ID NO: 17846 - DNA, 119 bp, homo sapiens
ccgccctagccctaaggccactcacctctgccaggccgctgagccgccgcgcgttgccgggacaacggccgccaggaacgcggaaatagccgaaggtgagcgaggcggccccgaggact

SEQ ID NO: 17847 - DNA, 119 bp, homo sapiens
cccgaagcgccccgagcggccggaaagagccgaaggcgatcgggcacgcacgtgcagctccgaggcccggcgtcgggggccaggttattccgctctgcaagagagaagcgggacgagct

SEQ ID NO: 17848 - DNA, 119 bp, homo sapiens
ctaacgtagcgcagaagcacatactccacccaggaaagggtgcgcttaactgcctcagacgtgcttccaacttctcagaactcaggttcgcgcccgattccacactccgagctaccacg

SEQ ID NO: 17849 - DNA, 119 bp, homo sapiens
gtgcttccacacttctcagaactcaggttcgcgcccgattccacactccgagctaccacgccgttttctctcacgtatccgtcaacactgctgcggccaatcacagcacgggccctggc

SEQ ID NO: 17850 - DNA, 119 bp, homo sapiens
ccgttttcttctcacgtatccgtcaacactgctgcggccaatcacagcacgggccctggcctattggcttctgtccaccaatccaaagagacgcacagtccgcaaggtcgcgaggctgg

SEQ ID NO: 17851 - DNA, 119 bp, homo sapiens
gcagccggatgctaatcgcatggattccctttattgaactgtactagttactgcagtcagattaagtcaatttaaaagcagaccatccagttgcactgaaaccgattatattcattaca

SEQ ID NO: 17852 - DNA, 119 bp, homo sapiens
attaagtcacatttaaaagcagaccatccagttgcactgaaaccgattatattcattacatagttttaacactgtccggtgaactggcaaatccaatcaaagcattagtctttaattaa

SEQ ID NO: 17853 - DNA, 119 bp, homo sapiens
tagttttaatcactgtccggtgaactggcaaatccaatcaaagcattagtctttaattaaaaaattaaaggaaatattcagacaatagccaagcaatcacatcacgatgcacaattacc

SEQ ID NO: 17854 - DNA, 119 bp, homo sapiens
aaaattaaaaggaaatattcagacaatagccaagcaatcacatcacgatgcacaattacctagaattgcattaaaaagtagttaaccgaagggggtggggggtgggggggaagaaaaac

SEQ ID NO: 17855 - DNA, 119 bp, homo sapiens
aagaagcaaagaaaaaaaatcacactaattcttttttaaaaactatcaatataatacatgaaggaacaaggacaatagccttaaaaagcaggtttctctaactctagaaatgtagtctg

SEQ ID NO: 17856 - DNA, 119 bp, homo sapiens
aaggaacaaaggacaatagccttaaaaagcaggtttctctaactctagaaatgtagtctgcggcggaaatctaaaagcacactagctgtagcaggacaataaaaaatactgagcatgga

SEQ ID NO: 17857 - DNA, 119 bp, homo sapiens
cggcggaaagtctaaaagcacactagctgtagcaggacaataaaaaatactgagcatggaatacttttatctctgccattaatattcatttccagctgcttataatagcagcgcctcat

SEQ ID NO: 17858 - DNA, 119 bp, homo sapiens
atacttttaatctctgccattaatattcatttccagctgcttataatagcagcgcctcatggccaaatcttagagttttacatctgggttgcaaatgacactttgattggatgtaatgt

SEQ ID NO: 17859 - DNA, 119 bp, homo sapiens
ggccaaatcattagagttttacatctgggttgcaaatgacactttgattggatgtaatgttcaaatggcctccccacggcgtctccggcaagccttctgcggagaggtgtcctgttgag

SEQ ID NO: 17860 - DNA, 119 bp, homo sapiens
tcaaatggccctccccacggcgtctccggcaagccttctgcggagaggtgtcctgttgagcgatccctcctgtgcgtgctggctcatcgtgtggttctgcaaaggcgaagaaaggagac

SEQ ID NO: 17861 - DNA, 119 bp, homo sapiens
cagggctcctgtgttcatctctctcccctgaggggcacaagctgggtaccttacctgtgaaacacacgggcatttgaaggtgccgcccatgccctcgaagctgtgctcaatgaggtgac

SEQ ID NO: 17862 - DNA, 119 bp, homo sapiens
aacacacggggcatttgaaggtgccgcccatgccctcgaagctgtgctcaatgaggtgacagaggagctggccggggagtcgaacatctggttgcacagcttacactcgtggttgatgc

SEQ ID NO: 17863 - DNA, 119 bp, homo sapiens
agaggagcttggccggggagtcgaacatctggttgcacagcttacactcgtggttgatgccttcctctgaaggaaaacccgtgaccagtcagtgaccagcatgccatgtcccccagaca

SEQ ID NO: 17864 - DNA, 119 bp, homo sapiens
ggactgcacttacccggggcactggcgatgtctgggtgcctttccggggcccactggtctccggcgtgagtcacggtggtccacctgcatgtggctctccaggtcttcggcactctcaa

SEQ ID NO: 17865 - DNA, 119 bp, homo sapiens
ccggcgtgaggtcacggtggtccacctgcatgtggctctccaggtcttcggcactctcaaacttgacacgcactcggggcaacggaggccggcacagggccggtcggcgggctcgggcg

SEQ ID NO: 17866 - DNA, 119 bp, homo sapiens
acttgacactgcactcggggcaacggaggccggcacagggccggtcggcgggctcgggcggggccaggcacccacctgtccgttggcgctgcgggccatgcagccggcgcagaggccgt

SEQ ID NO: 17867 - DNA, 119 bp, homo sapiens
gggccaggccacccacctgtccgttggcgctgcgggccatgcagccggcgcagaggccgtagggcagccattgacgtcaagcttcaccaggtcctgcttgctgcggaactccttgaggc

SEQ ID NO: 17868 - DNA, 119 bp, homo sapiens
agggcagcccattgacgtcaagcttcaccaggtcctgcttgctgcggaactccttgaggcacagggcgccttgtagagcttctgcagcccctggccattgggggaggacgccgctgagc

SEQ ID NO: 17869 - DNA, 119 bp, homo sapiens
acagggcgcacttgtagagcttctgcagcccctggccattgggggaggacgccgctgagctgcccgccacttctgcatgtggaaggtgccatggatcttgagctcaagcgtggaagtga

SEQ ID NO: 17870 - DNA, 119 bp, homo sapiens
tgcccgccagcttctgcatgtggaaggtgccatggatcttgagctcaagcgtggaagtgactgtctgcagcagaccacacagcggaagcccgtgagtgagttgcgcaggtcagggtgca

SEQ ID NO: 17871 - DNA, 119 bp, homo sapiens
ctgtctgcatgcagaccacacagcggaagcccgtgagtgagttgcgcaggtcagggtgcatctggcagtctcaataaactcctcctcgctctgcaggggcatcttgcagatgcgacagg

SEQ ID NO: 17872 - DNA, 119 bp, homo sapiens
tgcccgtgtccaggctcttgctgtgggtcaccttgtgttcggtgagcgtcagcagcgaagggaagcgctaccacagatgggacacatgtagtgcttggcagggccccggtgcgtctgca

SEQ ID NO: 17873 - DNA, 119 bp, homo sapiens
ggaagcgctcaccacagatgggacacatgtagtgcttggcagggccccggtgcgtctgcaggtgctccctagcccgttctccgagaagaaagtccgtgaacaaacgttgcacttgtgac

SEQ ID NO: 17874 - DNA, 119 bp, homo sapiens
ggtgctcccgtagcccgttctccgagaagaaagtccgtgaacaaacgttgcacttgtgactgcccttgaaaactcagccttcttgcgtgagccatcatcctcgcccggccggatattgt

SEQ ID NO: 17875 - DNA, 119 bp, homo sapiens
tgcccttgataaactcagccttcttgcgtgagccatcatcctcgcccggccggatattgtggtcccgcaccggtgattctgcagcagcacctccatggtgtaggccgccccacagatgt

SEQ ID NO: 17876 - DNA, 119 bp, homo sapiens
ggtcccgcagccggtgattctgcagcagcacctccatggtgtaggccgccccacagatgtcacagccgtcatgggctccgacgcgtccacgtcatcctcgctggcctcatggctgttag

SEQ ID NO: 17877 - DNA, 119 bp, homo sapiens
cacagccgtacatgggctccgacgcgtccacgtcatcctcgctggcctcatggctgttaggtgcctcaggttcttaagcagcatgccctgcaggtcagcaggctcagctttcttggtgg

SEQ ID NO: 17878 - DNA, 119 bp, homo sapiens
gtgcctcagggttcttaagcagcatgccctgcaggtcagcaggctcagctttcttggtggccattggggtaccccattggccgtgccgttctcggtcgcagcatcaaacacacagtgct

SEQ ID NO: 17879 - DNA, 119 bp, homo sapiens
ccattgggggtaccccattggccgtgccgttctcggtcgcagcatcaaacacacagtgcttctcccgcagtgcttctccagcaggatgatggcgtggaaggccttgctgcagaacttac

SEQ ID NO: 17880 - DNA, 119 bp, homo sapiens
tctcccgcaggtgcttctccagcaggatgatggcgtggaaggccttgctgcagaacttacagttatactcttgctgtgtgtggtgatgtggcactgcagctccacctcggtgctgaagg

SEQ ID NO: 17881 - DNA, 119 bp, homo sapiens
agttatacttcttgctgtgtgtggtgatgtggcactgcagctccacctcggtgctgaaggtctccccacgaagatgcacttgtgagccttggccgggttgcccaggtggctgtgtttga

SEQ ID NO: 17882 - DNA, 119 bp, homo sapiens
tctccccacagaagatgcacttgtgagccttggccgggttgcccaggtggctgtgtttgacgtgcacctcaggtcagcctccttgcggaagtcccagttgcaggccgtgcagcggtaca

SEQ ID NO: 17883 - DNA, 119 bp, homo sapiens
cgtgcacctgcaggtcagcctccttgcggaagtcccagttgcaggccgtgcagcggtacatcttcttctattgctgtgcttcaccgccaggtgcacctggatggacaccttggagtcga

SEQ ID NO: 17884 - DNA, 119 bp, homo sapiens
tcttcttctcattgctgtgcttcaccgccaggtgcacctggatggacaccttggagtcgaagacctcctacacagggtgcagtggtacaacacaaaggtgtgcatgtccagcaggtgct

SEQ ID NO: 17885 - DNA, 119 bp, homo sapiens
agacctcctgacacagggtgcagtggtacaacacaaaggtgtgcatgtccagcaggtgcttctgcaggtatccaccgaggaaaattgcttgtcgcagctctcgcacacatagtgggtcg

SEQ ID NO: 17886 - DNA, 119 bp, homo sapiens
tctgcaggtcatccaccgaggaaaattgcttgtcgcagctctcgcacacatagtgggtcgacgtggtcagtaatgcactgtcaggtgctgcaggagggactcctgggagtcaaagtcct

SEQ ID NO: 17887 - DNA, 119 bp, homo sapiens
acgtggtcatgtaatgcactgtcaggtgctgcaggagggactcctgggagtcaaagtcctctttgcactggggcacgcttgcttccgcagcagcagctccaggtgcagcttcaggtggg

SEQ ID NO: 17888 - DNA, 119 bp, homo sapiens
ctttgcactgggggcacgcttgcttccgcagcagcagctccaggtgcagcttcaggtgggtctggaagcctcaaagttggagaacttgaggtcgcattgattgcaaggatactccccat

SEQ ID NO: 17889 - DNA, 119 bp, homo sapiens
tctggaagctctcaaagttggagaacttgaggtcgcattgattgcaaggatactccccattggagatgggttggcgcttgctgagagccgctgccgcttcggggaagacacctccacat

SEQ ID NO: 17890 - DNA, 119 bp, homo sapiens
tggagatggagttggcgcttgctgagagccgctgccgcttcggggaagacacctccacatcggacgagatgggctctgctcggccttggacttcttgctgtgggccagtggaatgttct

SEQ ID NO: 17891 - DNA, 119 bp, homo sapiens
cggacgagactgggctctgctcggccttggacttcttgctgtgggccagtggaatgttcttgtggttctcttgatgtgcttggtgagtttcaggatggagccaaagatgggggagttgg

SEQ ID NO: 17892 - DNA, 119 bp, homo sapiens
tgtggttctccttgatgtgcttggtgagtttcaggatggagccaaagatgggggagttggtgcagtagggcaggaatagacctccatgaaggactgcgtgggctgcaccaccggagact

SEQ ID NO: 17893 - DNA, 119 bp, homo sapiens
tgcagtaggggcaggaatagacctccatgaaggactgcgtgggctgcaccaccggagactctagtttggactgcccacactgcagtgggcctgctggatgtgctcggtgagggaggact

SEQ ID NO: 17894 - DNA, 119 bp, homo sapiens
ctagtttggcactgcccacactgcagtgggcctgctggatgtgctcggtgagggaggactcagtaaggaacccatggagcactggttgcagaagaaagcattattaccgtcagaggggt

SEQ ID NO: 17895 - DNA, 119 bp, homo sapiens
cagtaaggaaacccatggagcactggttgcagaagaaagcattattaccgtcagaggggttggcgttgggccgcagtgggagacgcggatgtgctcctgcaggctattgatgtcggcga

SEQ ID NO: 17896 - DNA, 119 bp, homo sapiens
tggcgttggggccgcagtgggagacgcggatgtgctcctgcaggctattgatgtcggcgaacatctcgggcagtagttgcagtggaaggcagagatgttgccaaactgcatcacagggt

SEQ ID NO: 17897 - DNA, 119 bp, homo sapiens
acatctcggggcagtagttgcagtggaaggcagagatgttgccaaactgcatcacagggtaggcatggtcttgtgcagcttgcgaacgtgctcgttgaggttgtagagggtgggcatgg

SEQ ID NO: 17898 - DNA, 119 bp, homo sapiens
aggcatggttcttgtgcagcttgcgaacgtgctcgttgaggttgtagagggtgggcatggagtccaggcgatctgacatgtgtggctctgctggggcttgtccgcgtggatggtcttca

SEQ ID NO: 17899 - DNA, 119 bp, homo sapiens
agtccaggcagatctgacatgtgtggctctgctggggcttgtccgcgtggatggtcttcaggtggatctcagcacggccaggctgttaaagtcccgcttggaacaataggggcagctat

SEQ ID NO: 17900 - DNA, 119 bp, homo sapiens
ggtggatctccagcacggccaggctgttaaagtcccgcttggaacaataggggcagctatagaccacctggtccagccctgcccgtcatcccgcatcttcttctgcccccgcagcggct

SEQ ID NO: 17901 - DNA, 119 bp, homo sapiens
agaccaccttggtccagccctgcccgtcatcccgcatcttcttctgcccccgcagcggcttcaaggtgggtccggggtggagccacgctccacagaggcgctggagtcgggtgtggcgc

SEQ ID NO: 17902 - DNA, 119 bp, homo sapiens
tcaaggtggagtccggggtggagccacgctccacagaggcgctggagtcgggtgtggcgctgctcatggggccacgctgcccagtacagggtcgggactgacactgtggttgctggagt

SEQ ID NO: 17903 - DNA, 119 bp, homo sapiens
tgctcatggaggccacgctgcccagtacagggtcgggactgacactgtggttgctggagtcgggctgccgtggctgtccaggtggcagtagacaccttccactgaggagaactgctcag

SEQ ID NO: 17904 - DNA, 119 bp, homo sapiens
cgggctgccggtggctgtccaggtggcagtagacaccttccactgaggagaactgctcagggcacatgggcacttgtgtttctggttggcgtgggcttggtggatatgggcgagcagtg

SEQ ID NO: 17905 - DNA, 119 bp, homo sapiens
ggcacatggggcacttgtgtttctggttggcgtgggcttggtggatatgggcgagcagtgtgttctcgtgacgaagacctcagggcagtgaatgcactgcaggtccgccttctcggaca

SEQ ID NO: 17906 - DNA, 119 bp, homo sapiens
tgttctcgtcgacgaagacctcagggcagtgaatgcactgcaggtccgccttctcggacagctgcgggtgcgggtgagcacgtgcttctccagctcctccgtctggctgaaggtgtcct

SEQ ID NO: 17907 - DNA, 119 bp, homo sapiens
gctgcgggtggcgggtgagcacgtgcttctccagctcctccgtctggctgaaggtgtcctcgcagtagtgcacatgaagtcgtccttcttggcttccttctccgacttggccagatgct

SEQ ID NO: 17908 - DNA, 119 bp, homo sapiens
cgcagtagtcgcacatgaagtcgtccttcttggcttccttctccgacttggccagatgctccttgttcttttgtgggcctgcatgtggctctgcagcgagctggtggaggagaagccgc

SEQ ID NO: 17909 - DNA, 119 bp, homo sapiens
ccttgttctttttgtgggcctgcatgtggctctgcagcgagctggtggaggagaagccgcgcttgcacaagtgcacttgaagggcttgctggagctgtgggtcttcaggtggatcttga

SEQ ID NO: 17910 - DNA, 119 bp, homo sapiens
gcttgcacacagtgcacttgaagggcttgctggagctgtgggtcttcaggtggatcttgaggtggtcgcgcgggagaaggctgcctcgcactcgtggcagtgatacttcttgtcgcccg

SEQ ID NO: 17911 - DNA, 119 bp, homo sapiens
ggtggtcgctgcgggagaaggctgcctcgcactcgtggcagtgatacttcttgtcgcccgtatgcagctgatgtgccggtcacggctcctcttgtgcttgaagaggcggctgcagtagg

SEQ ID NO: 17912 - DNA, 119 bp, homo sapiens
tatgcagcttgatgtgccggtcacggctcctcttgtgcttgaagaggcggctgcagtaggtgcacttgacggcagcttgtcgctgtggatctgctcgtgcctcttcaagtagctcaagc

SEQ ID NO: 17913 - DNA, 119 bp, homo sapiens
tgcacttgaacggcagcttgtcgctgtggatctgctcgtgcctcttcaagtagctcaagcggatgaaggcttgtcgcagaactggcaagggtatggcaggcccgtgcccccttcctcct

SEQ ID NO: 17914 - DNA, 119 bp, homo sapiens
ggatgaaggacttgtcgcagaactggcaagggtatggcaggcccgtgcccccttcctcctcgccgaggcgaggtcacaaccatctccgatcatctgcgtgggtgacgcaacatccttgc

SEQ ID NO: 17915 - DNA, 119 bp, homo sapiens
cgccgaggccgaggtcacaaccatctccgatcatctgcgtgggtgacgcaacatccttgctggagggagcgaggccacccaggagagttgtgggtcgtcatcaccatctgcaagagaag

SEQ ID NO: 17916 - DNA, 119 bp, homo sapiens
ctggggctgttttgcattacctccaggacagcggtgggcccggtggtccgtcaggtctgccagagactcaagtcctgctgacagtgatcgcaggtgtaaattgattcatcctccatgtc

SEQ ID NO: 17917 - DNA, 119 bp, homo sapiens
ttcatcatcctcatttctctcctcttgacttgtcacgctgttcctgtcttccagcgcacggctggtttttgatcgcactctggctctccttctaggcctcctgccaacaggaagaatac

SEQ ID NO: 17918 - DNA, 119 bp, homo sapiens
cctctgtccgactgtaaaaggaacaccttacccctgagaccttgcaggagcaccccctccccgcgcagtgtcagaagaaataaaccagctgctactttctgcgaggttttacccagccg

SEQ ID NO: 17919 - DNA, 119 bp, homo sapiens
ccgcgcagttgtcagaagaaataaaccagctgctactttctgcgaggttttacccagccgccagggggcccgcgcgtcccccgcagctcctgaaccggctgagactctggtctccgggc

SEQ ID NO: 17920 - DNA, 119 bp, homo sapiens
ccagggggcgccgcgcgtcccccgcagctcctgaaccggctgagactctggtctccgggcaggcccgggagggttctgacttgggaaaagtcttccccagacggctcccctaaaccgtt

SEQ ID NO: 17921 - DNA, 119 bp, homo sapiens
aagacctcatggaagttccaaggtcgttaggcagagccttgtaaagcatggctgtagatgagtaataaaacaggtgtgtgcaacctctgccctccctattctttgccattccaaaccct

SEQ ID NO: 17922 - DNA, 119 bp, homo sapiens
agtaataaagacaggtgtgtgcaacctctgccctccctattctttgccattccaaaccctttccctcgaaaaggtacatgtgatcttccattttgacttttttatttatttatttattt

SEQ ID NO: 17923 - DNA, 119 bp, homo sapiens
atgaaccaccatgctcggcctcattttgaacattttaattagaaagttacaaaacatcatgggttcttttacaagatttgcattagaataatttaataaaatgcaaaccaatgtttata

SEQ ID NO: 17924 - DNA, 119 bp, homo sapiens
gggttctttatacaagatttgcattagaataatttaataaaatgcaaaccaatgtttatacgtatcttgcatctttccatatctcattgccttatgtgaatttaaacaagaaactattt

SEQ ID NO: 17925 - DNA, 119 bp, homo sapiens
cgtatcttgtcatctttccatatctcattgccttatgtgaatttaaacaagaaactatttttcgtttagtcttaagaaaaaaatttaggcatataaaacagcctgaatattaaaaaaag

SEQ ID NO: 17926 - DNA, 119 bp, homo sapiens
ttcgtttagatcttaagaaaaaaatttaggcatataaaacagcctgaatattaaaaaaagacaagggggcagtgttagggaattcctctgcttgaatacttcaaaatagctttgtttcc

SEQ ID NO: 17927 - DNA, 119 bp, homo sapiens
acaagggggtcagtgttagggaattcctctgcttgaatacttcaaaatagctttgtttccaaaactgtttagtaagcctaaaggagcactaaaaacgacaactgatctccaaagtaaac

SEQ ID NO: 17928 - DNA, 119 bp, homo sapiens
aaaactgttttagtaagcctaaaggagcactaaaaacgacaactgatctccaaagtaaactgaggcacaactgaggggtgtgtttctgggtgggcatgaagcatggatcaccggggcca

SEQ ID NO: 17929 - DNA, 119 bp, homo sapiens
tgaggcacacactgaggggtgtgtttctgggtgggcatgaagcatggatcaccggggccatgtccttccgtggcaatgacctgcttgggatcaggaagcagctccatgtgttcttggag

SEQ ID NO: 17930 - DNA, 119 bp, homo sapiens
tgtccttccagtggcaatgacctgcttgggatcaggaagcagctccatgtgttcttggaggagactgccacatcctcaggaggtgaatgggctgaacaagccatcttccgtgtgcagag

SEQ ID NO: 17931 - DNA, 119 bp, homo sapiens
gagactgcccacatcctcaggaggtgaatgggctgaacaagccatcttccgtgtgcagaggccccttccgccatctctgctcctgcagacacttgcttagccacgagggtaatccactg

SEQ ID NO: 17932 - DNA, 119 bp, homo sapiens
gccccttccagccatctctgctcctgcagacacttgcttagccacgagggtaatccactggactgcttgtattctgctagtggccaggctggactggcctgcccaggccagcatcctct

SEQ ID NO: 17933 - DNA, 119 bp, homo sapiens
gactgcttggtattctgctagtggccaggctggactggcctgcccaggccagcatcctctttacactctactgcttcttgtgtccttcccaaagctgcccgccccactctgatgggcac

SEQ ID NO: 17934 - DNA, 119 bp, homo sapiens
ttacactcttactgcttcttgtgtccttcccaaagctgcccgccccactctgatgggcaccctgttcctagtcaagggaaacgccagccgctgggcttcccgctagccttccaaataaa

SEQ ID NO: 17935 - DNA, 119 bp, homo sapiens
cctgttccttagtcaagggaaacgccagccgctgggcttcccgctagccttccaaataaacttgtggtttcaggcagcgggagccaatcccaacaccaacccctgtcgcccctgtcctt

SEQ ID NO: 17936 - DNA, 119 bp, homo sapiens
cttgtggttgtcaggcagcgggagccaatcccaacaccaacccctgtcgcccctgtcctttgcaggaaggggagggctgtcaaggaggaggagggccaagtgcccaggctgttgggtga

SEQ ID NO: 17937 - DNA, 119 bp, homo sapiens
tgcaggaagggggagggctgtcaaggaggaggagggccaagtgcccaggctgttgggtgagggccagaagaacctgttgtgacaatgctttcttcccccagtgctgctgagggggctga

SEQ ID NO: 17938 - DNA, 119 bp, homo sapiens
gggccagaaagaacctgttgtgacaatgctttcttcccccagtgctgctgagggggctgagaatgaaacgcccctctgacttcagcctgccatccaggggcacagacagagggaaaaat

SEQ ID NO: 17939 - DNA, 119 bp, homo sapiens
gaatgaaacagcccctctgacttcagcctgccatccaggggcacagacagagggaaaaatagggcaaaggcccagtcacagtacggcaaagatccagggctgctcagctgagctgatga

SEQ ID NO: 17940 - DNA, 119 bp, homo sapiens
agggcaaagagcccagtcacagtacggcaaagatccagggctgctcagctgagctgatgacagatgactactgttgggctggggcaggtggacggtccaagtgtccttcagcggccctc

SEQ ID NO: 17941 - DNA, 119 bp, homo sapiens
cagatgactgactgttgggctggggcaggtggacggtccaagtgtccttcagcggccctccctgattgctgtgctaatgcggcccttgcccttgggccctgcccctccaggtctccagt

SEQ ID NO: 17942 - DNA, 119 bp, homo sapiens
cctgattgcctgtgctaatgcggcccttgcccttgggccctgcccctccaggtctccagttaaaggcctagctctggaaatcaaagctgtgaatgggaaatggagaagcccaggggtgc

SEQ ID NO: 17943 - DNA, 119 bp, homo sapiens
taaaggcctcagctctggaaatcaaagctgtgaatgggaaatggagaagcccaggggtgcaaagtgctatgattggcatgtttgtcacaagagagccctgaaaagagtaagagtggctc

SEQ ID NO: 17944 - DNA, 119 bp, homo sapiens
aaagtgctagtgattggcatgtttgtcacaagagagccctgaaaagagtaagagtggctcacaacagaagtagaaatgcacagtgtgttcctcagttcaacagaggaaaagtctctgct

SEQ ID NO: 17945 - DNA, 119 bp, homo sapiens
acaacagaaggtagaaatgcacagtgtgttcctcagttcaacagaggaaaagtctctgcttgaccagagtgggactctttccaagatgtctgaactgactgcaattttctcctgaaatt

SEQ ID NO: 17946 - DNA, 119 bp, homo sapiens
tgaccagagatgggactctttccaagatgtctgaactgactgcaattttctcctgaaattcaacgctaagcaaagaaggaaaacccaaaaagctaattatagcctccaggaactctcag

SEQ ID NO: 17947 - DNA, 119 bp, homo sapiens
caacgctaaggcaaagaaggaaaacccaaaaagctaattatagcctccaggaactctcagacctttccaaaactagtccctgacaattctgcaggagctctgaagatacggaactgtgt

SEQ ID NO: 17948 - DNA, 119 bp, homo sapiens
acctttccacaaactagtccctgacaattctgcaggagctctgaagatacggaactgtgtagagcaaaacggaaagaaccgttgtctctgagggaaaagcacacaagcccgcaggtgtc

SEQ ID NO: 17949 - DNA, 119 bp, homo sapiens
agagcaaaaccggaaagaaccgttgtctctgagggaaaagcacacaagcccgcaggtgtccgctgggcttttcaaaaggtcctaagatgttcccagaagatgacaatgaggcagccacg

SEQ ID NO: 17950 - DNA, 119 bp, homo sapiens
cgctgggctctttcaaaaggtcctaagatgttcccagaagatgacaatgaggcagccacggtcctgctggtcttcagaaatggcctttctaggataagtgctccttacacaagtctccc

SEQ ID NO: 17951 - DNA, 119 bp, homo sapiens
gtcctgctgagtcttcagaaatggcctttctaggataagtgctccttacacaagtctccccggggcgtcctgtcacaggaatggtggtcaccacctgattctgaaacacgaagatcttg

SEQ ID NO: 17952 - DNA, 119 bp, homo sapiens
cggggcgtcactgtcacaggaatggtggtcaccacctgattctgaaacacgaagatcttgattctttcaacacccagaggaagataagcaggatgctgacatactgcacccaggcgaac

SEQ ID NO: 17953 - DNA, 119 bp, homo sapiens
attctttcaaacacccagaggaagataagcaggatgctgacatactgcacccaggcgaactttaccatccccagaatcctggctgataagtatggacagttaaggagtgaagggccaca

SEQ ID NO: 17954 - DNA, 119 bp, homo sapiens
cagtaacacagagaaacaaaggagctggacaatgagaagcgctcttacgttgtatcgggcatctaggccccacagctcagcggctgcttctgctgcagcctcaggtctccgttcacgta

SEQ ID NO: 17955 - DNA, 119 bp, homo sapiens
atctaggccaccacagctcagcggctgcttctgctgcagcctcaggtctccgttcacgtataactgggacccgggacaggaaaggaggactggagaaacgccatgctctgcatcacgag

SEQ ID NO: 17956 - DNA, 119 bp, homo sapiens
taactgggatcccgggacaggaaaggaggactggagaaacgccatgctctgcatcacgagggtcgccatctctgaaatcattagaaggaccaacaataccaaccgccatcagatctgaa

SEQ ID NO: 17957 - DNA, 119 bp, homo sapiens
cagcctcccagcggactgactcacgtgtaatcgataggagaaagtcaggatgagctgcacaccgagaactgctccgtggactgcaggggaagctccagcttaaaatgtaacatgtccgt

SEQ ID NO: 17958 - DNA, 119 bp, homo sapiens
accgagaacgtgctccgtggactgcaggggaagctccagcttaaaatgtaacatgtccgtcttcccatctggttcctgtcttcttctctagtctaggaaacccaaacaggcccagcagc

SEQ ID NO: 17959 - DNA, 119 bp, homo sapiens
cttcccatcctggttcctgtcttcttctctagtctaggaaacccaaacaggcccagcagccctggtcacaatgagtctgggaggaatccacatcacttctgtaaatacacaatgaccca

SEQ ID NO: 17960 - DNA, 119 bp, homo sapiens
cctggtcactaatgagtctgggaggaatccacatcacttctgtaaatacacaatgacccactgtcttgcgtacacaacaggcattatctcctccactaaaagagaaaagcagatagatg

SEQ ID NO: 17961 - DNA, 119 bp, homo sapiens
tgccccaggcccaggcgggaaccacgcaccgaaacgagcgggacgcgcaggcgatccccttgcagccggtgaaggcggggaacgtgctccaggcgaggaacccgtcgctttcgggtccg

SEQ ID NO: 17962 - DNA, 119 bp, homo sapiens
tgcagccggttgaaggcggggaacgtgctccaggcgaggaacccgtcgctttcgggtccgagcagggcccgagcagcacctggtgttggaagcgcacggtcggctgctcctcgtagctg

SEQ ID NO: 17963 - DNA, 119 bp, homo sapiens
agcagggccacgagcagcacctggtgttggaagcgcacggtcggctgctcctcgtagctgctccgcttcgccaaaaccctgagttaaagagggcggtagggaggcggttagggaggccg

SEQ ID NO: 17964 - DNA, 119 bp, homo sapiens
ctccgcttcagccaaaaccctgagttaaagagggcggtagggaggcggttagggaggccggccctggccagcgcgcccggggagcctcgtggcacagcggccggggcaggctcaccgtg

SEQ ID NO: 17965 - DNA, 119 bp, homo sapiens
gccctggccgagcgcgcccggggagcctcgtggcacagcggccggggcaggctcaccgtggctccggaagccaccagcagcggcgggatgtacgtgagcgcagcggccagcagcaggaa

SEQ ID NO: 17966 - DNA, 119 bp, homo sapiens
gctccggaaggccaccagcagcggcgggatgtacgtgagcgcagcggccagcagcaggaacagcgcggcttggagcagagccccgcgcggtaactgcgctcgaccgggtgagagaagag

SEQ ID NO: 17967 - DNA, 119 bp, homo sapiens
cagcgcggctttggagcagagccccgcgcggtaactgcgctcgaccgggtgagagaagagctcatagaggccatgagcaccgctcgcaggcactccgcgagccgggggaccaagtttgg

SEQ ID NO: 17968 - DNA, 119 bp, homo sapiens
ctcatagagcgccatgagcaccgctcgcaggcactccgcgagccgggggaccaagtttggcttctcctgttgccatcgcctcggtctccacggcaaccgacggctcacagaaaggagcc

SEQ ID NO: 17969 - DNA, 119 bp, homo sapiens
ggagactggtgagagctagggcaggaagagggggagaccccctaaaaaactagcaagaggcacacaaggtgtctggaaggaagagctcccttgactgtggggaggacctggggcaattg

SEQ ID NO: 17970 - DNA, 119 bp, homo sapiens
cttttcttctgtgttctctctctctgatgttgctttggatgccagatgctgataagggtgtcagcgtgctgattgtttctgcttcagcagtcaagcagggcaggtatgagaagcaataa

SEQ ID NO: 17971 - DNA, 119 bp, homo sapiens
tcagcgtgcctgattgtttctgcttcagcagtcaagcagggcaggtatgagaagcaataaagcagaaacggagattcaaagtcaaaatgacaaggtccttaaagcattttcaggcccct

SEQ ID NO: 17972 - DNA, 119 bp, homo sapiens
agcagaaacaggagattcaaagtcaaaatgacaaggtccttaaagcattttcaggcccctattttgagtattttagcttttcccccaatttatcttccgcttcaattaaatggctcttc

SEQ ID NO: 17973 - DNA, 119 bp, homo sapiens
attttgagtcattttagcttttcccccaatttatcttccgcttcaattaaatggctcttcagctttctaggtggcctttatagccttctgtggtccaccatccctacgttgccaacact

SEQ ID NO: 17974 - DNA, 119 bp, homo sapiens
agctttctatggtggcctttatagccttctgtggtccaccatccctacgttgccaacactttgtatggttagtttcttctcaaaaaatgctccatcgtagacttcagagaattgggtcc

SEQ ID NO: 17975 - DNA, 119 bp, homo sapiens
ttgtatggtttagtttcttctcaaaaaatgctccatcgtagacttcagagaattgggtccccctgtgaggaaggtaggctgggcacaactgacttttttcatccctaacagtggctttg

SEQ ID NO: 17976 - DNA, 119 bp, homo sapiens
ccctgtgagagaaggtaggctgggcacaactgacttttttcatccctaacagtggctttgtgggtgagttccagactcgggtggtttgtgttgtgagtactgtaggtggatgggaggcg

SEQ ID NO: 17977 - DNA, 119 bp, homo sapiens
tgggtgagtgtccagactcgggtggtttgtgttgtgagtactgtaggtggatgggaggcgtccttagaatagagtgtccagtctttgtttcctcaaacaggaagaaaagttagaagtaa

SEQ ID NO: 17978 - DNA, 119 bp, homo sapiens
tccttagaagtagagtgtccagtctttgtttcctcaaacaggaagaaaagttagaagtaaagagagggtggccttcccattggggtctaagctgtacccttttcatgcagtttgtcttt

SEQ ID NO: 17979 - DNA, 119 bp, homo sapiens
agagagggtgggccttcccattggggtctaagctgtacccttttcatgcagtttgtctttgggatgggtgacttctggtcttctcaaggaggggaagtggccaagctgtctttgattca

SEQ ID NO: 17980 - DNA, 119 bp, homo sapiens
gggatgggttgacttctggtcttctcaaggaggggaagtggccaagctgtctttgattcagctctttggaacacctggacttggaaagggccttggctcctgaaagctagctctgtgtt

SEQ ID NO: 17981 - DNA, 119 bp, homo sapiens
gctctttgggaacacctggacttggaaagggccttggctcctgaaagctagctctgtgtttgacctcactaataaggctgttactcccaatcccaaggatagacagtgggaggggtgaa

SEQ ID NO: 17982 - DNA, 119 bp, homo sapiens
tgacctcacctaataaggctgttactcccaatcccaaggatagacagtgggaggggtgaattcttcatatgagcttcaaaagccacttggcctgagtcttcagttaaggacgaagactg

SEQ ID NO: 17983 - DNA, 119 bp, homo sapiens
ttcttcatactgagcttcaaaagccacttggcctgagtcttcagttaaggacgaagactgagactcagctcctggagacttggctctggggctaagctggtccttggctcaagccctga

SEQ ID NO: 17984 - DNA, 119 bp, homo sapiens
agactcagcttcctggagacttggctctggggctaagctggtccttggctcaagccctgaaggtccttgagttctctgacaccttctagagtgaaagtactggctggcctgcttacctt

SEQ ID NO: 17985 - DNA, 119 bp, homo sapiens
aggtccttgtagttctctgacaccttctagagtgaaagtactggctggcctgcttaccttggggcagggattttgctttctggaaagaagtgatccagaggcccatggactaaaaggca

SEQ ID NO: 17986 - DNA, 119 bp, homo sapiens
ggggcaggggattttgctttctggaaagaagtgatccagaggcccatggactaaaaggcatagtggttttcaggagctgtggggaaaaattctctccgagttgctgttaaagccaggag

SEQ ID NO: 17987 - DNA, 119 bp, homo sapiens
tagtggtttttcaggagctgtggggaaaaattctctccgagttgctgttaaagccaggaggccagattctcagatgggactccagtttcctccccaggacagatgtctgccatggtacc

SEQ ID NO: 17988 - DNA, 119 bp, homo sapiens
gccagattcctcagatgggactccagtttcctccccaggacagatgtctgccatggtaccctttatttttttccttctggatctgtgatttcccattggcacagctctgccatcctgct

SEQ ID NO: 17989 - DNA, 119 bp, homo sapiens
ctttattttatttccttctggatctgtgatttcccattggcacagctctgccatcctgcttcccatgctcctgcttccttggggctgactttgagttctgggtccagggcacctgactg

SEQ ID NO: 17990 - DNA, 119 bp, homo sapiens
tcccatgctgcctgcttccttggggctgactttgagttctgggtccagggcacctgactggggcaagagcctcctgagcctgtgccttccccagggcagactgcctcctgctctctggg

SEQ ID NO: 17991 - DNA, 119 bp, homo sapiens
gggcaagagccctcctgagcctgtgccttccccagggcagactgcctcctgctctctgggctttgctgcgcttttgagaagtgttcttccgtccctccaggtcctgccttctgaaggaa

SEQ ID NO: 17992 - DNA, 119 bp, homo sapiens
ctttgctgctgcttttgagaagtgttcttccgtccctccaggtcctgccttctgaaggaacatctctcctgcccttgtgattctctttcctgttccccttcctctgctgctcctccacc

SEQ ID NO: 17993 - DNA, 119 bp, homo sapiens
catctctccttgcccttgtgattctctttcctgttccccttcctctgctgctcctccacccgcctcccagggcagatctctgctttcttggcagagggagcctctaccacttcccacag

SEQ ID NO: 17994 - DNA, 119 bp, homo sapiens
cgcctcccaagggcagatctctgctttcttggcagagggagcctctaccacttcccacagacacacttcgctaccctggtctccacactgcctgctgcctcagaactgcctctgcttct

SEQ ID NO: 17995 - DNA, 119 bp, homo sapiens
acacacttccgctaccctggtctccacactgcctgctgcctcagaactgcctctgcttctgtcagaagctctggggctggctgtggggacagacccttgccatcttgactctcccaggg

SEQ ID NO: 17996 - DNA, 119 bp, homo sapiens
gtcagaagcatctggggctggctgtggggacagacccttgccatcttgactctcccagggacacacagctcctgctgcctgaagtctgccatctctggctttttctgaactggcacacc

SEQ ID NO: 17997 - DNA, 119 bp, homo sapiens
acacacagcctcctgctgcctgaagtctgccatctctggctttttctgaactggcacaccttttggctcgatttttctggggctctgcctttctcttcttgagagtccccttttccatc

SEQ ID NO: 17998 - DNA, 119 bp, homo sapiens
ttttggctctgatttttctggggctctgcctttctcttcttgagagtccccttttccatcctgccttgaacccctttgacagggattctttcagtcacttcccagggacaggtctcagc

SEQ ID NO: 17999 - DNA, 119 bp, homo sapiens
ctgccttgacacccctttgacagggattctttcagtcacttcccagggacaggtctcagccttggcactctgtcagatttatacacacctgcatcaggaacatcccatgggcacacgtc

SEQ ID NO: 18000 - DNA, 119 bp, homo sapiens
cttggcactgctgtcagatttatacacacctgcatcaggaacatcccatgggcacacgtcagcggccctcccccagtgctgaccagtctctgggagctagctttaggttggtcagggcg

SEQ ID NO: 18001 - DNA, 119 bp, homo sapiens
agcggccctgcccccagtgctgaccagtctctgggagctagctttaggttggtcagggcgctgtctgtcaggtgagagacggaatctgctggggcagtggtctcccatggacagacgga

SEQ ID NO: 18002 - DNA, 119 bp, homo sapiens
ctgtctgtctaggtgagagacggaatctgctggggcagtggtctcccatggacagacggattgtagctctggcttgttttttccccatcttcagtagtgaattcttctgtgtctgcagc

SEQ ID NO: 18003 - DNA, 119 bp, homo sapiens
ttgtagctcatggcttgttttttccccatcttcagtagtgaattcttctgtgtctgcagctggagcttttcttgggttatgtgttctgggaaggaacctgtctttgggtcttgtctcag

SEQ ID NO: 18004 - DNA, 119 bp, homo sapiens
tggagctttttcttgggttatgtgttctgggaaggaacctgtctttgggtcttgtctcaggtccccctttctgttgcttccaaggaatgtccctctgccacttcactactcatgctgct

SEQ ID NO: 18005 - DNA, 119 bp, homo sapiens
gtcccccttctctgttgcttccaaggaatgtccctctgccacttcactactcatgctgctgggcaagtcgagatcttgggggcctgagcaggggattccctcaagtccttgttctccca

SEQ ID NO: 18006 - DNA, 119 bp, homo sapiens
gggcaagtctgagatcttgggggcctgagcaggggattccctcaagtccttgttctcccaaatacaaatgtttcctgttgttgacacagttttgccatcccttttgatacgtcttctcc

SEQ ID NO: 18007 - DNA, 119 bp, homo sapiens
aatacaaatagtttcctgttgttgacacagttttgccatcccttttgatacgtcttctcccagggaagtagtctccccttttctagagctttctccctctgctctgctgattcactccc

SEQ ID NO: 18008 - DNA, 119 bp, homo sapiens
cagggaagtgagtctccccttttctagagctttctccctctgctctgctgattcactccctgccttttgtccaatcccttcccagtagttccttcacttacctcccagggacagatctt

SEQ ID NO: 18009 - DNA, 119 bp, homo sapiens
tgccttttggtccaatcccttcccagtagttccttcacttacctcccagggacagatcttggctttttcctggtagcagcttcctgtgcttcccagggacacacttcacctggcctgca

SEQ ID NO: 18010 - DNA, 119 bp, homo sapiens
ggctttttcactggtagcagcttcctgtgcttcccagggacacacttcacctggcctgcagcccatatgtccagttcctggaacccagcttttggtccatcagcatctagagtacctgg

SEQ ID NO: 18011 - DNA, 119 bp, homo sapiens
gcccatatgatccagttcctggaacccagcttttggtccatcagcatctagagtacctggatgctgagacaggcccctggacccacactcccccagggacaagccacctcccactctgg

SEQ ID NO: 18012 - DNA, 119 bp, homo sapiens
atgctgagaacaggcccctggacccacactcccccagggacaagccacctcccactctggggttggctttgtggcttctctggagcagtaacagctctctccctgggtccaagatctgc

SEQ ID NO: 18013 - DNA, 119 bp, homo sapiens
ggttggcttctgtggcttctctggagcagtaacagctctctccctgggtccaagatctgcagaaaccttcctgtatcatttggagatttcctaatggcctcagctcccaaagccctttc

SEQ ID NO: 18014 - DNA, 119 bp, homo sapiens
agaaaccttgcctgtatcatttggagatttcctaatggcctcagctcccaaagccctttcctcccctgcccagcacccacctcccagggacagatttctgccttcccagcagtcaagtt

SEQ ID NO: 18015 - DNA, 119 bp, homo sapiens
ctcccctgctccagcacccacctcccagggacagatttctgccttcccagcagtcaagttttcctccactccaaagggcaaatgtcggcagctttgcttcccacactgcctgacatctg

SEQ ID NO: 18016 - DNA, 119 bp, homo sapiens
ttcctccacatccaaagggcaaatgtcggcagctttgcttcccacactgcctgacatctggagaagggttggggtctctctgtgtcttgaggacgtggttgtggggagaagctgccagg

SEQ ID NO: 18017 - DNA, 119 bp, homo sapiens
gagaagggtttggggtctctctgtgtcttgaggacgtggttgtggggagaagctgccagggtccacacttcccaggggccgaccgcttcttgcttttggatctgcccctcaggcttttc

SEQ ID NO: 18018 - DNA, 119 bp, homo sapiens
gtccacactctcccaggggccgaccgcttcttgcttttggatctgcccctcaggcttttcccaagctgtacatcttcgatttccgattttccaggcattttctccttgtccttttgaga

SEQ ID NO: 18019 - DNA, 119 bp, homo sapiens
ccaagctgtgacatcttcgatttccgattttccaggcattttctccttgtccttttgagattctcctcccttggcacctgtgctgatgtccattcctctcttgttctttcatttacctc

SEQ ID NO: 18020 - DNA, 119 bp, homo sapiens
ttctcctcctcttggcacctgtgctgatgtccattcctctcttgttctttcatttacctcccagggacaatttctgttttggcaggtgttgcttcctgtgcctccggcctgagatcttc

SEQ ID NO: 18021 - DNA, 119 bp, homo sapiens
ccagggacagatttctgttttggcaggtgttgcttcctgtgcctccggcctgagatcttcctgtggacaacctgcgttgctctgcttcctccattgcataggaattggctaccagcttt

SEQ ID NO: 18022 - DNA, 119 bp, homo sapiens
ctgtggacacacctgcgttgctctgcttcctccattgcataggaattggctaccagctttggatgaggattgtctagacatgggctggagtgcccagggaccgtgctctccctgggaca

SEQ ID NO: 18023 - DNA, 119 bp, homo sapiens
ggatgaggaattgtctagacatgggctggagtgcccagggaccgtgctctccctgggacaaactgactctgctgttgacttaatttctgcactgctttcacagtttgttcccccatctc

SEQ ID NO: 18024 - DNA, 119 bp, homo sapiens
aactgactcctgctgttgacttaatttctgcactgctttcacagtttgttcccccatctctccaaagctccttttctggaggctttttccttttcttgaagagattctctacctgtccc

SEQ ID NO: 18025 - DNA, 119 bp, homo sapiens
tccaaagcttccttttctggaggctttttccttttcttgaagagattctctacctgtccccagactcagatttcctgccccatcacgttatcatccagctcccagggacagatctctgc

SEQ ID NO: 18026 - DNA, 119 bp, homo sapiens
cagactcagcatttcctgccccatcacgttatcatccagctcccagggacagatctctgctttctggatgcaggagcatctcctgcctcccacagacacacttcagcaatgccactgcc

SEQ ID NO: 18027 - DNA, 119 bp, homo sapiens
tttctggatagcaggagcatctcctgcctcccacagacacacttcagcaatgccactgcccaaactcccgaacactctgagcttcctggggcctgaattgagactgctgaggggccccg

SEQ ID NO: 18028 - DNA, 119 bp, homo sapiens
gaaatctgtactctcccatggacaaagagactccaagtctcctcccggtttctgttctttccaaaaggtgctttcctggttttctgcttttcctgagggagatccttcactgcctcttg

SEQ ID NO: 18029 - DNA, 119 bp, homo sapiens
ccaaaaggttgctttcctggttttctgcttttcctgagggagatccttcactgcctcttgggctggtttccatcctcgcctccttcacttgcctcccagggacacggctctgccttggt

SEQ ID NO: 18030 - DNA, 119 bp, homo sapiens
ggctggtttcccatcctcgcctccttcacttgcctcccagggacacggctctgccttggtgatgtcagggtatgagcttctgggccagcagcttcccacccaggcttctccaccttcct

SEQ ID NO: 18031 - DNA, 119 bp, homo sapiens
gatgtcaggggtatgagcttctgggccagcagcttcccacccaggcttctccaccttcctggcctccacctgtcccccgcctcagatttgtctctgattctgccagggtcctgaggagc

SEQ ID NO: 18032 - DNA, 119 bp, homo sapiens
ggcctccacactgtcccccgcctcagatttgtctctgattctgccagggtcctgaggagctgacccagggacagacctcctcgatcggcactctcccagggacacactgcttcctgctc

SEQ ID NO: 18033 - DNA, 119 bp, homo sapiens
tgacccaggggacagacctcctcgatcggcactctcccagggacacactgcttcctgctccctcaccagctctctggctttttccgcatcatgggaaccacatctatgggctctgattt

SEQ ID NO: 18034 - DNA, 119 bp, homo sapiens
cctcaccagcctctctggctttttccgcatcatgggaaccacatctatgggctctgattttccccgggctcccctctctttttttgggagtcacctgggtcttgtcttagtgccctcga

SEQ ID NO: 18035 - DNA, 119 bp, homo sapiens
tccccgggcctcccctctctttttttgggagtcacctgggtcttgtcttagtgccctcgactctggggcccttcactcgtctcccaggggcagatttcggccttgttgccactgtctgg

SEQ ID NO: 18036 - DNA, 119 bp, homo sapiens
ctctggggctccttcactcgtctcccaggggcagatttcggccttgttgccactgtctggctgacgcgttctgattcagtgacctcccaggggcatacctctgccaccctgtggtcagc

SEQ ID NO: 18037 - DNA, 119 bp, homo sapiens
ctgacgcgtttctgattcagtgacctcccaggggcatacctctgccaccctgtggtcagcgctgccgaggactggaggccagctttgggcagttcctgccacccgacaggggtttcttt

SEQ ID NO: 18038 - DNA, 119 bp, homo sapiens
gctgccgagggactggaggccagctttgggcagttcctgccacccgacaggggtttcttttgattgcttatgtttttgtccctggaaacttgcctcagcatggcaagccctgttttacc

SEQ ID NO: 18039 - DNA, 119 bp, homo sapiens
tgattgcttgatgtttttgtccctggaaacttgcctcagcatggcaagccctgttttacctgctctctcgctttccgttcccctagaccctgggtcatcctcctgcctctgtcttcttg

SEQ ID NO: 18040 - DNA, 119 bp, homo sapiens
tgctctctcagctttccgttcccctagaccctgggtcatcctcctgcctctgtcttcttgttccctgctccctcccgttgacagacttggagcatcctgctggtgtgagcgttctgttg

SEQ ID NO: 18041 - DNA, 119 bp, homo sapiens
ttccctgctgccctcccgttgacagacttggagcatcctgctggtgtgagcgttctgttggttctggaggactccttgtcatcggaggggataagagcggcctgcttactcaccgcctt

SEQ ID NO: 18042 - DNA, 119 bp, homo sapiens
gttctggagggactccttgtcatcggaggggataagagcggcctgcttactcaccgccttgggccggccagcctgggcgatcgggagggtgcccccatactctctcccgcagtcccgct

SEQ ID NO: 18043 - DNA, 119 bp, homo sapiens
gggccggcctagcctgggcgatcgggagggtgcccccatactctctcccgcagtcccgctgttctgccctcgggactctcctccacactctccttctctctgtaggtgctccgagaacg

SEQ ID NO: 18044 - DNA, 119 bp, homo sapiens
gttctgcccctcgggactctcctccacactctccttctctctgtaggtgctccgagaacgggtcagagcttaatcgccagccccaggctgcgcatggaaccctgctgaacaggggcctt

SEQ ID NO: 18045 - DNA, 119 bp, homo sapiens
ggtcagagctttaatcgccagccccaggctgcgcatggaaccctgctgaacaggggccttgaggctgtggatttagggaagatcttgggcctgtcttcgtccacatcattagcttccct

SEQ ID NO: 18046 - DNA, 119 bp, homo sapiens
gaggctgtgggatttagggaagatcttgggcctgtcttcgtccacatcattagcttccctctggtgatggcatcctctgcgtccatctcattctccccagccctgcttttctctactgc

SEQ ID NO: 18047 - DNA, 119 bp, homo sapiens
ctggtgatgtgcatcctctgcgtccatctcattctccccagccctgcttttctctactgcaacagagaggccctccagagcctggctcgagctggggcaggggagtggtggcctcgctc

SEQ ID NO: 18048 - DNA, 119 bp, homo sapiens
aacagagagggccctccagagcctggctcgagctggggcaggggagtggtggcctcgctctggccctgagggccttcctggggcacattttcttgcttggctggcagttctgcgttctc

SEQ ID NO: 18049 - DNA, 119 bp, homo sapiens
tggccctgaggggccttcctggggcacattttcttgcttggctggcagttctgcgttctcccaggggcaatgtaggtgagtaagttggggctttgtggggatactgggactggtgccag

SEQ ID NO: 18050 - DNA, 119 bp, homo sapiens
caggggctggggttggagctagagctggcagcagagctggagccaaggtggaggtgggagatagcatcctggctctcccaggcccccagacagggccaagatgggggtagaaacctggt

SEQ ID NO: 18051 - DNA, 119 bp, homo sapiens
atagcatccttggctctcccaggcccccagacagggccaagatgggggtagaaacctggtgcctgatggtggatgaggcagccttctcctagcctcctcatgaagcctcccagaggtgt

SEQ ID NO: 18052 - DNA, 119 bp, homo sapiens
gcctgatgggtggatgaggcagccttctcctagcctcctcatgaagcctcccagaggtgtgagagctgtcacgctgctgctcttggcaggggaaggtggagctgacaggggggcccctc

SEQ ID NO: 18053 - DNA, 119 bp, homo sapiens
gagagctgtccacgctgctgctcttggcaggggaaggtggagctgacaggggggcccctcgaggccgctcagcctcctggctgatggcctccgcaccaggctggccatggctgccttgg

SEQ ID NO: 18054 - DNA, 119 bp, homo sapiens
gaggccgctccagcctcctggctgatggcctccgcaccaggctggccatggctgccttggccttcttccctcctcccgctcctttgcttgccggtaggtctcctccaggtaggcctggc

SEQ ID NO: 18055 - DNA, 119 bp, homo sapiens
ccttcttccgctcctcccgctcctttgcttgccggtaggtctcctccaggtaggcctggctggccatgacaaggccttttccctggagctggccacactgagcgacttctgcagagagg

SEQ ID NO: 18056 - DNA, 119 bp, homo sapiens
tggccatgagcaaggccttttccctggagctggccacactgagcgacttctgcagagaggcgggccgggtctgggtagcctctctcccaccgtcaggttgtgggcgctggctgacctga

SEQ ID NO: 18057 - DNA, 119 bp, homo sapiens
cgggccgggctctgggtagcctctctcccaccgtcaggttgtgggcgctggctgacctgaagcccagggagggggcccctccaccgactcccggctctctgttcgagaggccttcttgg

SEQ ID NO: 18058 - DNA, 119 bp, homo sapiens
agcccagggcagggggcccctccaccgactcccggctctctgttcgagaggccttcttggccagcttcccctcagcagtgagtcaagaagaggcgggtcctgctccctgcgctggtcat

SEQ ID NO: 18059 - DNA, 119 bp, homo sapiens
ccagcttcctcctcagcagtgagtcaagaagaggcgggtcctgctccctgcgctggtcataggtgctgcggacttgtgcagagctggtgtcccctcgggttcctggaggctggagctga

SEQ ID NO: 18060 - DNA, 119 bp, homo sapiens
aggtgctgcgggacttgtgcagagctggtgtcccctcgggttcctggaggctggagctgaggagccggcgcgggaggagccgggcaggctgccgtggcctggggatcctgagtcccggg

SEQ ID NO: 18061 - DNA, 119 bp, homo sapiens
ggagccggcggcgggaggagccgggcaggctgccgtggcctggggatcctgagtcccgggagtgctgccggccagggcctcggggaattccgccaggtacctcatgaaggagcggccca

SEQ ID NO: 18062 - DNA, 119 bp, homo sapiens
agtgctgcctggccagggcctcggggaattccgccaggtacctcatgaaggagcggcccagtccctggctgagctgcctcgcttcttgggcaggtgggggttgtttgcggccatttcct

SEQ ID NO: 18063 - DNA, 119 bp, homo sapiens
gtccctggcatgagctgcctcgcttcttgggcaggtgggggttgtttgcggccatttccttggttttgtgacctctagctgggcatagagcttcttcagctcgtcctgtggggcagcag

SEQ ID NO: 18064 - DNA, 119 bp, homo sapiens
gttcctaaaagctagcattgaaaggaggcagggagggtggcacatacccgaatgtctccagggtccaggtgtgctcactccaggctgaggcgatgctgctgccaaggtaggagcctgag

SEQ ID NO: 18065 - DNA, 119 bp, homo sapiens
gggtccaggctgtgctcactccaggctgaggcgatgctgctgccaaggtaggagcctgagtgctgcaggccagctcgtcctcacacacctcatccaccatctcctcccggggaggagcc

SEQ ID NO: 18066 - DNA, 119 bp, homo sapiens
tgctgcaggtccagctcgtcctcacacacctcatccaccatctcctcccggggaggagcccccagcttcagaactggcaggggcgcataagagtgggaaaaagactcgccctggctcct

SEQ ID NO: 18067 - DNA, 119 bp, homo sapiens
aggagtactgttagagtggaagggggtgtggggaggtgagtccgtcctcacctggctgtgtggaaggcacggaaagcagtagctcattgtgcagggcgatgcccatgtagcgtggctca

SEQ ID NO: 18068 - DNA, 119 bp, homo sapiens
tggaaggcagcggaaagcagtagctcattgtgcagggcgatgcccatgtagcgtggctcatggaaggccagagcacagcccgtgtggcgtagcagaggaagctgccccagcacagcagc

SEQ ID NO: 18069 - DNA, 119 bp, homo sapiens
tggaaggccgagagcacagcccgtgtggcgtagcagaggaagctgccccagcacagcagcagcagctcactgtggggagacagggagggagagagccggcaccacctcagcagctgtcc

SEQ ID NO: 18070 - DNA, 119 bp, homo sapiens
cccacaaccatgatgtagtcccagcggtcgtggtgacagaggtagaaatggcggccactgggagtgtggctcggatcaccagaggtgcgtgctggatgcctcgctccagggcgcccacg

SEQ ID NO: 18071 - DNA, 119 bp, homo sapiens
ggagtgtggcctcggatcaccagaggtgcgtgctggatgcctcgctccagggcgcccacggtccacacaccaggaagcccagcacaggtagcaggagcagccccaggcgccgcagcagc

SEQ ID NO: 18072 - DNA, 119 bp, homo sapiens
gtccacacagccaggaagcccagcacaggtagcaggagcagccccaggcgccgcagcagccgcccgctgtcagaagggcactccgctgggccgttcgagacagaaacagctgcagcact

SEQ ID NO: 18073 - DNA, 119 bp, homo sapiens
gccttgttccggcggcagcggtaggagaccagcatgctcaggaagatggccagcatgcagcaggcctggaggccagcacagcggcccgcagcaccgcggcctcttccaccaggcacggt

SEQ ID NO: 18074 - DNA, 119 bp, homo sapiens
caggcctggcaggccagcacagcggcccgcagcaccgcggcctcttccaccaggcacggtgtggcatcctgcagctggtgcagccctcaggacatggcagacactgcagcagtctccca

SEQ ID NO: 18075 - DNA, 119 bp, homo sapiens
gtggcatccatgcagctggtgcagccctcaggacatggcagacactgcagcagtctcccagatctgcctctgggaacccgaattgcccggtagtctggaagtcactctcctctaaccct

SEQ ID NO: 18076 - DNA, 119 bp, homo sapiens
caaacccacttacctgacttctgggctgaggtctggcttgagtccatagaaggtggcagagagtgtgatagccatccaggtcggagccgtccctcctggcattccaggaaaggaggaga

SEQ ID NO: 18077 - DNA, 119 bp, homo sapiens
gagtgtgatcagccatccaggtcggagccgtccctcctggcattccaggaaaggaggagacagcctcactgctgcgtgtcccccacatatccatctgcctgcggccacttggggctgcc

SEQ ID NO: 18078 - DNA, 119 bp, homo sapiens
cagcctcacctgctgcgtgtcccccacatatccatctgcctgcggccacttggggctgccgaggctcccaggtcattggtcaacactcgcttcttcagggcaggggtgtccaggtcccc

SEQ ID NO: 18079 - DNA, 119 bp, homo sapiens
gaggctccctaggtcattggtcaacactcgcttcttcagggcaggggtgtccaggtccccaggagggtttcctcctgcacccagttcccagacaagtcctgcaggatggtttcctcccc

SEQ ID NO: 18080 - DNA, 119 bp, homo sapiens
agtccgggtggcctgcagggccagctgtaggtggctggcccctggtggagggttaaaggtcagcaaagcctgtacactcttgggtccccctcggccacgctgcggaccagtgcctggta

SEQ ID NO: 18081 - DNA, 119 bp, homo sapiens
cagcaaagccctgtacactcttgggtccccctcggccacgctgcggaccagtgcctggtaccattccactcctcctccacactggactcacggatgtcgttggcttgcagcagcatgtt

SEQ ID NO: 18082 - DNA, 119 bp, homo sapiens
ccattccacatcctcctccacactggactcacggatgtcgttggcttgcagcagcatgttgagaaaattgcggcctgggcaagggtgcccgctgccccctgtaggcttggggggagccc

SEQ ID NO: 18083 - DNA, 119 bp, homo sapiens
gagaaaattggcggcctgggcaagggtgcccgctgccccctgtaggcttggggggagccctggcatggccctgccccacgcgcttcatagcgctcactgcaattcacctgtgatagctg

SEQ ID NO: 18084 - DNA, 119 bp, homo sapiens
tggcatggctcctgccccacgcgcttcatagcgctcactgcaattcacctgtgatagctgctgggcatcccagagtagagataagcgagggcggcctcggccccctctaggggcacctg

SEQ ID NO: 18085 - DNA, 119 bp, homo sapiens
ctgggcatctccagagtagagataagcgagggcggcctcggccccctctaggggcacctgcatgggtacgatcctggcttgacttgggaagacagagggggcagagagcggatgggccg

SEQ ID NO: 18086 - DNA, 119 bp, homo sapiens
catgggtacagatcctggcttgacttgggaagacagagggggcagagagcggatgggccgtggacccccagagcccaggcacagacaaaacagcagcccagcagcccccacataggagg

SEQ ID NO: 18087 - DNA, 119 bp, homo sapiens
tggaccccccagagcccaggcacagacaaaacagcagcccagcagcccccacataggagggggcatgacgctcccctggtgcccatccttggggcagctctcaggaccctggggtccag

SEQ ID NO: 18088 - DNA, 119 bp, homo sapiens
gccgacgcccaccggaactacagcccccatgatgcagtgggagtccgagcctctgcgtcgtccgcttggacgcgccggcggaggagtggcgcgcggaggagtggcgcgctgagacgccg

SEQ ID NO: 18089 - DNA, 119 bp, homo sapiens
tccgcttgggacgcgccggcggaggagtggcgcgcggaggagtggcgcgctgagacgccgctcgaagcgcgagtcgcggggcagcagaggcgtaaggagtaggcggggcgagccggctg

SEQ ID NO: 18090 - DNA, 119 bp, homo sapiens
ctcgaagcgccgagtcgcggggcagcagaggcgtaaggagtaggcggggcgagccggctgggctcagggccaccagctcacccgggtcgaggggcaatctgaggcgactggtgacgcgc

SEQ ID NO: 18091 - DNA, 119 bp, homo sapiens
ggctcagggtccaccagctcacccgggtcgaggggcaatctgaggcgactggtgacgcgcttatccactccctcctcccgcctccccctggggtggcgctcgctggtgacgtagtgagt

SEQ ID NO: 18092 - DNA, 119 bp, homo sapiens
ttatccacttccctcctcccgcctccccctggggtggcgctcgctggtgacgtagtgagtgtgatggccccgcgaggccgggaaggtgaaggtgagagggcgagcaagccggggtggcg

SEQ ID NO: 18093 - DNA, 119 bp, homo sapiens
tttttttttttggacaccggatccatctcccttttcttttctaataagtcaggactggtggagtcaacaagtcaatcaatagccaacctcaacctgagacaggacagaagagaactcag

SEQ ID NO: 18094 - DNA, 119 bp, homo sapiens
gagtcaacacagtcaatcaatagccaacctcaacctgagacaggacagaagagaactcagaatcttttttcttttggacttcagccatgtccatgatgcctaccctgtgaagatctctc

SEQ ID NO: 18095 - DNA, 119 bp, homo sapiens
aatctttttgtcttttggacttcagccatgtccatgatgcctaccctgtgaagatctctcaccatccaaaaagtaagtagtagctgtgacttctggcaccctggatttgagctgagtgg

SEQ ID NO: 18096 - DNA, 119 bp, homo sapiens
ctgggttcgctcacgttagcttctcttgcagcgcaatgtccctgctcttctctcgatgcaactctatcgcacagtcaagaaaaataagagacacatggctgaggtgaatgcatccccac

SEQ ID NO: 18097 - DNA, 119 bp, homo sapiens
ttaagcactttgtcactgccaagaagaagatcaatggcatttttgagcagctgggggcctacatccagggagcgccaccttccttgaaggtaagggggcaccggctcagccaggcccgc

SEQ ID NO: 18098 - DNA, 119 bp, homo sapiens
ctgtggaactcctctgaccacgtggtgacccattttcaatccccacctccagacacgtacaggaatgcaaactggaccccgttaccacagaagaacaggttctggacgtcaaaggttac

SEQ ID NO: 18099 - DNA, 119 bp, homo sapiens
aggaatgcagaactggaccccgttaccacagaagaacaggttctggacgtcaaaggttacctatccaaatgagaggcatcagtgaggtgctggctcggaggcacatgaaagtggctttt

SEQ ID NO: 18100 - DNA, 119 bp, homo sapiens
ctatccaaagtgagaggcatcagtgaggtgctggctcggaggcacatgaaagtggctttttttggccggaagtccttgaggcacccaccctttctttcttcctggctaggagggaggga

SEQ ID NO: 18101 - DNA, 119 bp, homo sapiens
atactggtggctttgctgacagctgttacttccttctaggacgagcaatgggaagagcaccgtgatcaagccatgctctgggacaaagttctgccctctgggattggccacaccaccaa

SEQ ID NO: 18102 - DNA, 119 bp, homo sapiens
cgtgatcaatgccatgctctgggacaaagttctgccctctgggattggccacaccaccaattgcttcctcgggtagagggcacagatggccatgaggcctttctccttaccgagggctc

SEQ ID NO: 18103 - DNA, 119 bp, homo sapiens
ttgcttcctgcgggtagagggcacagatggccatgaggcctttctccttaccgagggctcagaggaaaaaggagtgccaaggtgagggtgccaggctggctgtcagccctgtgcctgct

SEQ ID NO: 18104 - DNA, 119 bp, homo sapiens
aaatctcctggcctggtggttcctcctcagcctctttctttccttcctctgccatcagactgtgaaccactggcccatgccctccaccaggacaagcagctccatgccggcagcctagt

SEQ ID NO: 18105 - DNA, 119 bp, homo sapiens
tgtgaaccagctggcccatgccctccaccaggacaagcagctccatgccggcagcctagtgagtgtgattggcccaactctaagtgcccacttctgaaggatgacctcgttttgatgga

SEQ ID NO: 18106 - DNA, 119 bp, homo sapiens
gagtgtgatgtggcccaactctaagtgcccacttctgaaggatgacctcgttttgatggacaggtaagaggaggtgccctcctaggaggtccaaactggaaggcaccaggtttccattt

SEQ ID NO: 18107 - DNA, 119 bp, homo sapiens
gggccacctacactcactctggacacatttgtttgggctccaggtgcggcggcagcacatggagcgttgaccagcttcctggtggatgagctgggcgtggtggatcgatcccaggccgg

SEQ ID NO: 18108 - DNA, 119 bp, homo sapiens
ggagcgttgtaccagcttcctggtggatgagctgggcgtggtggatcgatcccaggccggggaccgcatttctttgtgtctgctaaggaggtgctcaacgccaggattcagaaagccca

SEQ ID NO: 18109 - DNA, 119 bp, homo sapiens
ggaccgcatcttctttgtgtctgctaaggaggtgctcaacgccaggattcagaaagcccagggcatgccgaaggaggtaatgatgagaacagatgtcctccttttctctgatgtttgag

SEQ ID NO: 18110 - DNA, 119 bp, homo sapiens
gcccttggttgtaggcccctggtggcccccacctccctccgtgcctctgtgtgttccaggagtgcatctccagtctgcagtgaagaccaagtttgagcagcacacggtccgggccaagc

SEQ ID NO: 18111 - DNA, 119 bp, homo sapiens
agtgcatctcccagtctgcagtgaagaccaagtttgagcagcacacggtccgggccaagcagattgcagggcggttcgactcatcatggactccctgcacatggcggctcgggagcagc

SEQ ID NO: 18112 - DNA, 119 bp, homo sapiens
agattgcagaggcggttcgactcatcatggactccctgcacatggcggctcgggagcagcagtaagagtcaagactgcagataggtggagagagctgccgagacaagggtgctccaccc

SEQ ID NO: 18113 - DNA, 119 bp, homo sapiens
tgctcctctgcttagtcagacaggaacatggatttctcaccagtactctgctttcagggtttactgcgagaaatgcgtgaagagcggcaagaccgactgaaatttattgacaaacagct

SEQ ID NO: 18114 - DNA, 119 bp, homo sapiens
ttactgcgaggaaatgcgtgaagagcggcaagaccgactgaaatttattgacaaacagctggagctcttgctcaagactataagctgcgaattaagcagattacggaggaagtggagag

SEQ ID NO: 18115 - DNA, 119 bp, homo sapiens
ggagctcttggctcaagactataagctgcgaattaagcagattacggaggaagtggagaggcaggtgagaatgaggaggaggcattctgggaagatttggactccgagtagagtccaga

SEQ ID NO: 18116 - DNA, 119 bp, homo sapiens
ttcctgacagatggcttgaaacccctccttcctgtgtctgtgcggagtcagatagacatgctggtcccagccagtgcttctccctcaactatgacctaaactgtgacaagctgtgtgct

SEQ ID NO: 18117 - DNA, 119 bp, homo sapiens
gacttccaggaagacattgagttccatttctctctcggatggaccatgctggtgaataggttcctgggcccaagaacagccgtcgggccttgatgggctacaatgaccaggcaagcaaa

SEQ ID NO: 18118 - DNA, 119 bp, homo sapiens
ctcaatacgtccccctcacccctctcatgtttctctcctcaggtccagcgtcccatccctctgacgccaccaaccccagcatgcccccactgccacagggctcgctcacccaggaggag

SEQ ID NO: 18119 - DNA, 119 bp, homo sapiens
ctgacgccagccaaccccagcatgcccccactgccacagggctcgctcacccaggaggagttcatggttccatggttaccggcctggcctccttgacatccaggacctccatgggcatt

SEQ ID NO: 18120 - DNA, 119 bp, homo sapiens
ttcatggtttccatggttaccggcctggcctccttgacatccaggacctccatgggcattcttgttgttgaggagtggtcagtgaccagttctgctcgggaaggtgggggcggagggca

SEQ ID NO: 18121 - DNA, 119 bp, homo sapiens
aggctgaccatgtgctctgcaggtgtggaaggcagtgggctggcggctcattgccctctcctttgggcttatggcctcctctacgtctatgagcgtctgacctggaccaccaaggccaa

SEQ ID NO: 18122 - DNA, 119 bp, homo sapiens
ggagagggccttcaagcgccagtttgtggagcatgccagcgagaagctgcagcttgtcatcagctacacggctccaactgcagccaccaagtccagcagtgagtggccctgtcggaccc

SEQ ID NO: 18123 - DNA, 119 bp, homo sapiens
agtggcatcttgctccacacaccccaactgggtcccttctctctcctccccagggaactgtctgggaccttgctcatctgtgtcagcaagttgacgtcacccgggagaacctggagcag

SEQ ID NO: 18124 - DNA, 119 bp, homo sapiens
tctgggacctttgctcatctgtgtcagcaagttgacgtcacccgggagaacctggagcaggaaattgccccatgaacaagaaaattgaggttcttgactcacttcagagcaaagcaaag

SEQ ID NO: 18125 - DNA, 119 bp, homo sapiens
gaaattgccgccatgaacaagaaaattgaggttcttgactcacttcagagcaaagcaaagctgctcagggaggctggcccgtgtggccaaaggttagggctccagggtgcagcccaggc

SEQ ID NO: 18126 - DNA, 119 bp, homo sapiens
ttctttgcaggaataaagccggttggttggacagtgagctcaacatgttcacacaccagtacctgcagccagcagatagtgggcacctgaggcggagtctgcgtggagaggggcggtgc

SEQ ID NO: 18127 - DNA, 119 bp, homo sapiens
acctgcagcccagcagatagtgggcacctgaggcggagtctgcgtggagaggggcggtgctgccagcccaagtgccatgtgggctcccccaggggcacgtgtggctcctgccccctggc

SEQ ID NO: 18128 - DNA, 119 bp, homo sapiens
tgccagccctaagtgccatgtgggctcccccaggggcacgtgtggctcctgccccctggccactgccaaagaatgaagcacccagtctcgtaccattttgagccctccagcactactta

SEQ ID NO: 18129 - DNA, 119 bp, homo sapiens
cactgccaagagaatgaagcacccagtctcgtaccattttgagccctccagcactacttattttccccccctttgcctgctgttgctggaagagctggctcatacccccaaaggacact

SEQ ID NO: 18130 - DNA, 119 bp, homo sapiens
ttttcccccacctttgcctgctgttgctggaagagctggctcatacccccaaaggacactttcagcgacgctatggacagcatggtaccaaggagttaagttgaggctttttccagctt

SEQ ID NO: 18131 - DNA, 119 bp, homo sapiens
tctctggttcatttgattgcttgataaggcctcaggatctcagcattgcacaatgcctcatggaagccttgagggtatcacacagacacccccaccttcctccagcctgtgcgcacctg

SEQ ID NO: 18132 - DNA, 119 bp, homo sapiens
tggaagcctttgagggtatcacacagacacccccaccttcctccagcctgtgcgcacctgccctccttgagcccagcacacctgcaggtgtaagggacgattggagtttcttcccagag

SEQ ID NO: 18133 - DNA, 119 bp, homo sapiens
ccctccttgcagcccagcacacctgcaggtgtaagggacgattggagtttcttcccagagagtctgtccagaaggactgtggcttgtgtgtgtccatctcgcctgttggctcagtgctt

SEQ ID NO: 18134 - DNA, 119 bp, homo sapiens
agtctgtcccagaaggactgtggcttgtgtgtgtccatctcgcctgttggctcagtgcttcatcccattgcagagcctcagacacgtcttggtggtgaggctcagttacccctgggctt

SEQ ID NO: 18135 - DNA, 119 bp, homo sapiens
catcccatttgcagagcctcagacacgtcttggtggtgaggctcagttacccctgggcttaggctgagggggccctgtgctgggggtggtagaaaggatgctgctgaggcagctggagg

SEQ ID NO: 18136 - DNA, 119 bp, homo sapiens
aggctgaggcgggccctgtgctgggggtggtagaaaggatgctgctgaggcagctggaggagtgggagtgctcagaggggagggctgttggatgtatggggagctggcagagcaggtgg

SEQ ID NO: 18137 - DNA, 119 bp, homo sapiens
agtgggagtagctcagaggggagggctgttggatgtatggggagctggcagagcaggtggcagtcactggacaaggagggacttgcctctcttctcattattgtgtcctttgctttagt

SEQ ID NO: 18138 - DNA, 119 bp, homo sapiens
cagtcactgggacaaggagggacttgcctctcttctcattattgtgtcctttgctttagtgtcagtcctgacttgtgcaggcctgttttgtgtagatctgttttggaagatggcatggt

SEQ ID NO: 18139 - DNA, 119 bp, homo sapiens
gtcagtcctggacttgtgcaggcctgttttgtgtagatctgttttggaagatggcatggtctaggtggtgaaggatgtagtagaaggatggatggtggaaggtggggacgttggtggct

SEQ ID NO: 18140 - DNA, 119 bp, homo sapiens
ctaggtggttgaaggatgtagtagaaggatggatggtggaaggtggggacgttggtggctggctgaggtcatgggccccacacaggacagctggagaatgggccgtccacttggcctcg

SEQ ID NO: 18141 - DNA, 119 bp, homo sapiens
ggctgaggtgcatgggccccacacaggacagctggagaatgggccgtccacttggcctcgttctgcgagggctcatgggtctgagagcccccacccactaggcttgattgcatccctgt

SEQ ID NO: 18142 - DNA, 119 bp, homo sapiens
ttctgcgaggggctcatgggtctgagagcccccacccactaggcttgattgcatccctgttgtgcccttaagagacatgtttccaccccacccccaaccttgtcccaagtgccctggac

SEQ ID NO: 18143 - DNA, 119 bp, homo sapiens
tgtgccctttaagagacatgtttccaccccacccccaaccttgtcccaagtgccctggactaaatttccgtgccagtgactgcagttggccaagggacaatgtggaaaacccagtgtcc

SEQ ID NO: 18144 - DNA, 119 bp, homo sapiens
taaatttcctgtgccagtgactgcagttggccaagggacaatgtggaaaacccagtgtccatctttccacctccctgatctccagaaccttcgactgacccccttgtctttatgctgat

SEQ ID NO: 18145 - DNA, 119 bp, homo sapiens
atctttccaccctccctgatctccagaaccttcgactgacccccttgtctttatgctgatgttgagtttgggattgttactggttgaagtgggggcagatgcctgtcaccaaggtgttg

SEQ ID NO: 18146 - DNA, 119 bp, homo sapiens
gttgagttttgggattgttactggttgaagtgggggcagatgcctgtcaccaaggtgttgactgtgtgaaaaagcagtttgggtgacaaatcctgtgtggcacaagttggatcgcttcc

SEQ ID NO: 18147 - DNA, 119 bp, homo sapiens
actgtgtgagaaaagcagtttgggtgacaaatcctgtgtggcacaagttggatcgcttcctagaaataacaacacctctcccaaaaagcagcccacaaggcaggggcccagcagcccag

SEQ ID NO: 18148 - DNA, 119 bp, homo sapiens
tagaaataagcaacacctctcccaaaaagcagcccacaaggcaggggcccagcagcccagccatcactctctttgaggaaatgagttggtagcctctgtgcactgtttggtggccacat

SEQ ID NO: 18149 - DNA, 119 bp, homo sapiens
ccatcactcatctttgaggaaatgagttggtagcctctgtgcactgtttggtggccacatcacaggtgagtcctgttcacatacctgcttgtatttaaagccctcagtctgtcctgttg

SEQ ID NO: 18150 - DNA, 119 bp, homo sapiens
cacaggtgatgtcctgttcacatacctgcttgtatttaaagccctcagtctgtcctgttgtgtggggcgagtgatggactctgccaggtggacatgctgtgggtggatgttcccggcgt

SEQ ID NO: 18151 - DNA, 119 bp, homo sapiens
tgtggggcgaagtgatggactctgccaggtggacatgctgtgggtggatgttcccggcgtgtgccgggctgaatggacaggggccacttcacagcatgtcagggaaaatcactgtcaca

SEQ ID NO: 18152 - DNA, 119 bp, homo sapiens
gtgccgggcctgaatggacaggggccacttcacagcatgtcagggaaaatcactgtcacacaattccaaggattttgtgctctttttgaaaaaaaaaaattctttagcgtaaacatgaa

SEQ ID NO: 18153 - DNA, 119 bp, homo sapiens
caattccaatggattttgtgctctttttgaaaaaaaaaaattctttagcgtaaacatgaattttttttcatgtagcccctggggaatgaatgaaattttgagcttcttcaatacgtaaa

SEQ ID NO: 18154 - DNA, 119 bp, homo sapiens
ttttttttcaatgtagcccctggggaatgaatgaaattttgagcttcttcaatacgtaaaattaaattttaccactgagggagagaccctttctgaaagaagtatggccaaaagcactt

SEQ ID NO: 18155 - DNA, 119 bp, homo sapiens
attaaatttataccactgagggagagaccctttctgaaagaagtatggccaaaagcactttaatgctgcgacattgttgtttttatgttcatttgctggagcgcaagacgtgctgacac

SEQ ID NO: 18156 - DNA, 119 bp, homo sapiens
taatgctgctgacattgttgtttttatgttcatttgctggagcgcaagacgtgctgacacagtgagtttctctgatgtatttaaggtgatgtatttgcttgagttactcctgtatcatt

SEQ ID NO: 18157 - DNA, 119 bp, homo sapiens
agtgagttttctctgatgtatttaaggtgatgtatttgcttgagttactcctgtatcattgctcataatttggaaactaaaataaaacctagttggaaatcctttgtgagatctgtctt

SEQ ID NO: 18158 - DNA, 119 bp, homo sapiens
cactgtgtggtgttgggaatgactttgatcaaagaatacagtggtctcaattatttataaaactttaatagggagaggccctaactcttcctcagctctaccaactactgaaaggaaaa

SEQ ID NO: 18159 - DNA, 119 bp, homo sapiens
aactttaatgagggagaggccctaactcttcctcagctctaccaactactgaaaggaaaagctggtgctgggagccctccacaccactgactgatgaatttcagcacgtcctggcacac

SEQ ID NO: 18160 - DNA, 119 bp, homo sapiens
gctggtgctggggagccctccacaccactgactgatgaatttcagcacgtcctggcacactgggctgtggaggtctgtgagcaaatggaagaacatgagaggaacttgttaatgctgga

SEQ ID NO: 18161 - DNA, 119 bp, homo sapiens
tttctacccaccacaggatctggggtgctgtaggcttctatacctgtaataaggcagggcagggctcgacaccagtgctcgctgccactagggaggcctcgtaggcgccacgctcatcc

SEQ ID NO: 18162 - DNA, 119 bp, homo sapiens
agggctcgaacaccagtgctcgctgccactagggaggcctcgtaggcgccacgctcatcccgaggcagacctgctccagccgctggtccatggagactgtaagcacccagtctcgaacc

SEQ ID NO: 18163 - DNA, 119 bp, homo sapiens
cgaggcagaacctgctccagccgctggtccatggagactgtaagcacccagtctcgaacctcttctctccagcctcctggaaaggacaagaagggagtggtagcttcacacagggcagg

SEQ ID NO: 18164 - DNA, 119 bp, homo sapiens
agtgtgaatagaggcctagggagaaggagggccagaaagggcctgctgtcctcaccttcatccagcactctccgccaggccgctgtttccagagtctcgcactttgaggtagcagtcca

SEQ ID NO: 18165 - DNA, 119 bp, homo sapiens
tccagcacttctccgccaggccgctgtttccagagtctcgcactttgaggtagcagtccacggcacggcgtactctccagcctgctcccagtgtcgagcttgttccacaaatccctcca

SEQ ID NO: 18166 - DNA, 119 bp, homo sapiens
cggcacggctgtactctccagcctgctcccagtgtcgagcttgttccacaaatccctccacacccctgtgagatgagagcgctgggacttggcatggtaggggggcagcatgctctatc

SEQ ID NO: 18167 - DNA, 119 bp, homo sapiens
cccctcatggccctgcatccagtgccccaccttataataattgagggccaggcctggtctctgggcccgagcagcagcccttctgctttctgaaagtccttctcctccaaggccccccg

SEQ ID NO: 18168 - DNA, 119 bp, homo sapiens
ctgggcccggagcagcagcccttctgctttctgaaagtccttctcctccaaggccccccgggcctgtccacaagcacctcggcgacactgtcagggtcgtgagcctcagccacacgctg

SEQ ID NO: 18169 - DNA, 119 bp, homo sapiens
ggcctgtcccacaagcacctcggcgacactgtcagggtcgtgagcctcagccacacgctgagctgcctccaatcctggttatggacaaacctgcctccaggtggggacagaggagagac

SEQ ID NO: 18170 - DNA, 119 bp, homo sapiens
gtggctctggctgggatggggcccgtggagagaaagcttggggcctcaccaattgtctgcagcgtggtcacagcagcttccaggagtcccagcttattaagcagtctaactgcagcctc

SEQ ID NO: 18171 - DNA, 119 bp, homo sapiens
agcgtggtcaacagcagcttccaggagtcccagcttattaagcagtctaactgcagcctctcctcccagctctttgcccacagataggccacgtgtttgtgggcattagcccctccttg

SEQ ID NO: 18172 - DNA, 119 bp, homo sapiens
tcctcccaggctctttgcccacagataggccacgtgtttgtgggcattagcccctccttgagttctggcacctgtaaagcaaagtcactcaataatcctgcaatacagagcttctccct

SEQ ID NO: 18173 - DNA, 119 bp, homo sapiens
gagatggagcctggttggggaagagatagggagagccaggagaagggctcaccttgcccagatgtaggttgtatcactgaggagatctggatggtgcttccctaccaggcggatcatgt

SEQ ID NO: 18174 - DNA, 119 bp, homo sapiens
gatgtaggtgtgtatcactgaggagatctggatggtgcttccctaccaggcggatcatgtcatcatacacttgtgctttttgtacatggtgatggcaagatcaggctcttgtactgtca

SEQ ID NO: 18175 - DNA, 119 bp, homo sapiens
catcatacaacttgtgctttttgtacatggtgatggcaagatcaggctcttgtactgtcacatatagccggggaaggagatacatctggggcctcctagacccgacccctgctatcact

SEQ ID NO: 18176 - DNA, 119 bp, homo sapiens
tatcctctactgcattgcctcgtgctgcggaaagggactcttcctcacctcatactcctgcagggatgctagtgttgggccacgagaggatagtatttggatgcagtgttccggtcctg

SEQ ID NO: 18177 - DNA, 119 bp, homo sapiens
cagggatgcatagtgttgggccacgagaggatagtatttggatgcagtgttccggtcctgtagatctaaatataaattgccttcttccactggcgggcacccagggcggcctcaattgc

SEQ ID NO: 18178 - DNA, 119 bp, homo sapiens
tagatctaatatataaattgccttcttccactggcgggcacccagggcggcctcaattgccttaatggacacctggcaaagttgggaaagatataaatatgtaggatgaaagatgaaga

SEQ ID NO: 18179 - DNA, 119 bp, homo sapiens
gggctaggaaaaggaagccagcataccctttcgtagagttcccccttgataagggctgcagtgatgtgtctaccagctctgtgttggctagcagttcctctcgggtcagcaccagccga

SEQ ID NO: 18180 - DNA, 119 bp, homo sapiens
gtgatgtgttctaccagctctgtgttggctagcagttcctctcgggtcagcaccagccgagcagctttgcagggagcccagctttgaggtagaggctgatggctgctagcccatcccct

SEQ ID NO: 18181 - DNA, 119 bp, homo sapiens
gcagctttggcagggagcccagctttgaggtagaggctgatggctgctagcccatccccttggctctccgtagttcacctgctcgctcctcttgctgtgtgtccatcagccactggtag

SEQ ID NO: 18182 - DNA, 119 bp, homo sapiens
tggctctcctgtagttcacctgctcgctcctcttgctgtgtgtccatcagccactggtagtaactacgagtagcttctccagggctgggtgcccctggacatgcacagaggacaactag

SEQ ID NO: 18183 - DNA, 119 bp, homo sapiens
tctcagaaccagactctcccaccacctcactggttattggccagcctctcaccggatgtagttgccatctcaatggctgttccaaactcgatgaggccctcatccaatgtgtaggcaac

SEQ ID NO: 18184 - DNA, 119 bp, homo sapiens
gttgccatcatcaatggctgttccaaactcgatgaggccctcatccaatgtgtaggcaacagtagtcacccttccatcaccatcacctcggtctttcccccgccccgctccagacctat

SEQ ID NO: 18185 - DNA, 119 bp, homo sapiens
agtagtcacaccttccatcaccatcacctcggtctttcccccgccccgctccagacctataacatcacctgtaaaagtttatcccccaacccaccccaatttcaggttagtttccactg

SEQ ID NO: 18186 - DNA, 119 bp, homo sapiens
aataccacatctgagggcccctagtgtccaacataccctaatagtgaacatggtgactctctcaggtgctcaatgttgtaccatacacacagactgtttcggttctgagctaccagcac

SEQ ID NO: 18187 - DNA, 119 bp, homo sapiens
ctcaggtgcctcaatgttgtaccatacacacagactgtttcggttctgagctaccagcacgtcacttccgggacccactgcatataggagcagaagttgaggatcattgtcttagagca

SEQ ID NO: 18188 - DNA, 119 bp, homo sapiens
gtcacttcctgggacccactgcatataggagcagaagttgaggatcattgtcttagagcagctttcaattcatacagatgcaactgaagaaagaaaaggcaggtaacacaattacaagg

SEQ ID NO: 18189 - DNA, 119 bp, homo sapiens
tgccctattccccaccctaccctcaattttggttcctacctcactaagccgattagtgttcaggtccccagcagcagtgtttctgatgtgtgagccaccaagtaacgttcctttcctag

SEQ ID NO: 18190 - DNA, 119 bp, homo sapiens
caggtcccccagcagcagtgtttctgatgtgtgagccaccaagtaacgttcctttcctaggattttcactcttccacctcatagccatagtgtgacttgagcaccactcgggttcctga

SEQ ID NO: 18191 - DNA, 119 bp, homo sapiens
gattttcacctcttccacctcatagccatagtgtgacttgagcaccactcgggttcctgatgacaggttttcacaatcaccttggtaaaggacaagtgtgagccccttaggcttcccca

SEQ ID NO: 18192 - DNA, 119 bp, homo sapiens
gatttttttctagtttggtgaaagtcaccaatccagaaagggattactagtaacacaccacacagagcctgagccatcccgcttccaggccaaggcagtgatggtgtataaattggtaa

SEQ ID NO: 18193 - DNA, 119 bp, homo sapiens
cacagagccgtgagccatcccgcttccaggccaaggcagtgatggtgtataaattggtaatctccttggctttgcctcttcccagatgcttcttcgagggatccagttgaacacccgaa

SEQ ID NO: 18194 - DNA, 119 bp, homo sapiens
tctccttgggctttgcctcttcccagatgcttcttcgagggatccagttgaacacccgaagcctgaaataagtatgtggcttttagaagagattgaggctgagctaaagagtgcaaatg

SEQ ID NO: 18195 - DNA, 119 bp, homo sapiens
aaaggggacttacctgtcataacttcctagcacaacagactggcccccaggacttgatacagctgtggtaactcccgctcctgagggtcacggctataatcaaaagtttgtagcatgtg

SEQ ID NO: 18196 - DNA, 119 bp, homo sapiens
agctgtggtgaactcccgctcctgagggtcacggctataatcaaaagtttgtagcatgtgaccttctttccataggctacaattttccgatcacagcctgcagccacgatgctattggt

SEQ ID NO: 18197 - DNA, 119 bp, homo sapiens
accttcttttccataggctacaattttccgatcacagcctgcagccacgatgctattggttgcccatgcaaggcatagggtggacacgggtggttaaccaacttcccctaagacagaag

SEQ ID NO: 18198 - DNA, 119 bp, homo sapiens
agaccccatcaataggttaaataaggtacacatgaatacactgtttaccttcatgtcagctggtttggtgagaatttatctctccgttctccatgttcatcatacagcaagaccactcg

SEQ ID NO: 18199 - DNA, 119 bp, homo sapiens
tggtttggtggagaatttatctctccgttctccatgttcatcatacagcaagaccactcggtccactgtcagacagcaaatttggcattgttctgggaccaagccatgcaggtcacctt

SEQ ID NO: 18200 - DNA, 119 bp, homo sapiens
gtccactgtgcagacagcaaatttggcattgttctgggaccaagccatgcaggtcacctttgcagctcctcctgtagaggcaaaggggtaaaaacaaacccatgtgctggtctagaatg

SEQ ID NO: 18201 - DNA, 119 bp, homo sapiens
gattttccaagttccattttgctttgtctaacagtggttttttaatctgtaaaagttaaaggatgtatttaggcaaaaaagagaggaagttatacttcatataatgtaagagattgagt

SEQ ID NO: 18202 - DNA, 119 bp, homo sapiens
ggatgtattataggcaaaaaagagaggaagttatacttcatataatgtaagagattgagtactgttcactcaattcatgttttacaataggcaataacagctacacgcttacttgatga

SEQ ID NO: 18203 - DNA, 119 bp, homo sapiens
actgttcacatcaattcatgttttacaataggcaataacagctacacgcttacttgatgaaggagctgagacacaatccaaaagacaccacagtcccccacaaaagcctccaaaccagt

SEQ ID NO: 18204 - DNA, 119 bp, homo sapiens
aggagctgatgacacaatccaaaagacaccacagtcccccacaaaagcctccaaaccagttgtcaccaaccactcacctctattcaagacagaggtcattacctttaagtataatattt

SEQ ID NO: 18205 - DNA, 119 bp, homo sapiens
tgtcaccaacccactcacctctattcaagacagaggtcattacctttaagtataatatttcccctttttctaagcagttttgaaaatggttttgtcaaaatattattgtctaaatacta

SEQ ID NO: 18206 - DNA, 119 bp, homo sapiens
cccctttttcctaagcagttttgaaaatggttttgtcaaaatattattgtctaaatactactgttttgttaaatgtgaaatatcattttgctgaaatagcttttctttctggaagactg

SEQ ID NO: 18207 - DNA, 119 bp, homo sapiens
ctgttttgtctaaatgtgaaatatcattttgctgaaatagcttttctttctggaagactggcttacatgcaatttatgatttgaatatctagtggcaaagctttggaacataggcattt

SEQ ID NO: 18208 - DNA, 119 bp, homo sapiens
gcttacatgacaatttatgatttgaatatctagtggcaaagctttggaacataggcatttacacataagagagggaaatcattaatgccaaacttttgcaaccaatatatatctaaaag

SEQ ID NO: 18209 - DNA, 119 bp, homo sapiens
acacataagcagagggaaatcattaatgccaaacttttgcaaccaatatatatctaaaagcaccaagggttaaaatttgagcatctctataaatctctttcagttaatcagaatggaaa

SEQ ID NO: 18210 - DNA, 119 bp, homo sapiens
caccaagggcttaaaatttgagcatctctataaatctctttcagttaatcagaatggaaataatgaatacaaaggctttatcaaataagattacacagtcaaggtagggcagtattttt

SEQ ID NO: 18211 - DNA, 119 bp, homo sapiens
taatgaatagcaaaggctttatcaaataagattacacagtcaaggtagggcagtatttttcttatgctggttttataagacataagcaaattatcatttaaacatttatttaatatagg

SEQ ID NO: 18212 - DNA, 119 bp, homo sapiens
cttatgctgagttttataagacataagcaaattatcatttaaacatttatttaatataggttaaaatgtatacataaagagaaaaaatgaacacaaatgtcaaacagaagaaaaccctt

SEQ ID NO: 18213 - DNA, 119 bp, homo sapiens
ttaaaatgtaatacataaagagaaaaaatgaacacaaatgtcaaacagaagaaaaccctttatattttatttggtcaacaaaaagtctgtgcataactcagcagcaggcctgaattaaa

SEQ ID NO: 18214 - DNA, 119 bp, homo sapiens
tatattttattttggtcaacaaaaagtctgtgcataactcagcagcaggcctgaattaaattaaaccaagctgcattgtgatggccatcaatgtacagactgcctgtctggcttagcac

SEQ ID NO: 18215 - DNA, 119 bp, homo sapiens
ttaaaccaaagctgcattgtgatggccatcaatgtacagactgcctgtctggcttagcacatcaaaagttaatcaaggctcaaaccaccatccttagaaatccaatatatatatatatg

SEQ ID NO: 18216 - DNA, 119 bp, homo sapiens
atcaaaagtctaatcaaggctcaaaccaccatccttagaaatccaatatatatatatatgaaaaaggcttctttctcagttaaattagataagtcttaaagttgggaaactactaaaaa

SEQ ID NO: 18217 - DNA, 119 bp, homo sapiens
aaaaaggctttctttctcagttaaattagataagtcttaaagttgggaaactactaaaaacaataaaaattaaaactgtattttgctaaagggtatagagtaaataacaacaacaacaa

SEQ ID NO: 18218 - DNA, 119 bp, homo sapiens
acaacaacaaaaatgacaaaccagaaacactaaaatgtgtttacatgtgaaagaatcatcacgttgattacgtcaaagaacatcatatttgtttatcttaatgcttggcatagttggtt

SEQ ID NO: 18219 - DNA, 119 bp, homo sapiens
acgttgatttacgtcaaagaacatcatatttgtttatcttaatgcttggcatagttggttttaaggtttagaaatatttttgaatttattattaaacaataggaacgtactgtacagaa

SEQ ID NO: 18220 - DNA, 119 bp, homo sapiens
ttaaggttttagaaatatttttgaatttattattaaacaataggaacgtactgtacagaatatttcaaactgctaccaagaaaacaagtacaaattctacctagcaatataggtttctt

SEQ ID NO: 18221 - DNA, 119 bp, homo sapiens
tatttcaaaactgctaccaagaaaacaagtacaaattctacctagcaatataggtttcttatcaacatacttttttcctcactggtttcaaactgacaaaggtgtagggagaaaataat

SEQ ID NO: 18222 - DNA, 119 bp, homo sapiens
atcaacataccttttttcctcactggtttcaaactgacaaaggtgtagggagaaaataattgaatggttctgaaggccacactagccctttagccaagagttctgcttctgaattacat

SEQ ID NO: 18223 - DNA, 119 bp, homo sapiens
tgaatggtttctgaaggccacactagccctttagccaagagttctgcttctgaattacatagaacatctggtccacagacaatggaatggatttttggagagagtgtcaatttagggct

SEQ ID NO: 18224 - DNA, 119 bp, homo sapiens
agaacatcttggtccacagacaatggaatggatttttggagagagtgtcaatttagggctaaagaaataagggtgagaatgaagccctcaacaaaagctccaaaagggcacagaaactg

SEQ ID NO: 18225 - DNA, 119 bp, homo sapiens
aaagaaatacagggtgagaatgaagccctcaacaaaagctccaaaagggcacagaaactggtaagtgactaaatatggagagacaggtgaggagaaaatacatagtaaatgctggctcg

SEQ ID NO: 18226 - DNA, 119 bp, homo sapiens
gtaagtgacctaaatatggagagacaggtgaggagaaaatacatagtaaatgctggctcgttattgcatttattctctcccttctctcatccattcatcttcttaagactgccttctgt

SEQ ID NO: 18227 - DNA, 119 bp, homo sapiens
ttattgcattttattctctcccttctctcatccattcatcttcttaagactgccttctgtgtccttttgagggaaattatcttaccctttaacatttgttccttcactattttaacaaa

SEQ ID NO: 18228 - DNA, 119 bp, homo sapiens
gtccttttgcagggaaattatcttaccctttaacatttgttccttcactattttaacaaaaagcctatagaaaaataataaattcaaggctattactaaaagcttgaataaaaataaca

SEQ ID NO: 18229 - DNA, 119 bp, homo sapiens
aagcctataagaaaaataataaattcaaggctattactaaaagcttgaataaaaataacaacaagcccttgctccaatcagtaaactcgtttcttggaataaaatcttcatttgtggaa

SEQ ID NO: 18230 - DNA, 119 bp, homo sapiens
acaagccctatgctccaatcagtaaactcgtttcttggaataaaatcttcatttgtggaaatggaatgagtctcttagtagacagtgttcatttagggtgtgatactctcacttttaga

SEQ ID NO: 18231 - DNA, 119 bp, homo sapiens
atggaatgatgtctcttagtagacagtgttcatttagggtgtgatactctcacttttagaagcaggaaaattactaaatattaatatgtgaaaagtaaggactttccttctgagggatt

SEQ ID NO: 18232 - DNA, 119 bp, homo sapiens
agcaggaaaaattactaaatattaatatgtgaaaagtaaggactttccttctgagggattattgctttaggacttgactttgtttatccttatagtatatcactgccttacataactgt

SEQ ID NO: 18233 - DNA, 119 bp, homo sapiens
attgctttatggacttgactttgtttatccttatagtatatcactgccttacataactgtggatatgatcccagtttctaatgatttgtccaaaatcgtctgagaaaaccaggccaata

SEQ ID NO: 18234 - DNA, 119 bp, homo sapiens
ggatatgatgcccagtttctaatgatttgtccaaaatcgtctgagaaaaccaggccaatacaaatataggaaaacctcttgaaaatacaattattatagacccacataaataaagtcta

SEQ ID NO: 18235 - DNA, 119 bp, homo sapiens
caaatatagtgaaaacctcttgaaaatacaattattatagacccacataaataaagtctaatctgaagttgatagctgattttatgttgaatatacgtcttttaaaaagtgttcttatt

SEQ ID NO: 18236 - DNA, 119 bp, homo sapiens
atctgaagtctgatagctgattttatgttgaatatacgtcttttaaaaagtgttcttattgaacataaatgtaaaataacattctggaaacaagtataaatattacatttattctgagt

SEQ ID NO: 18237 - DNA, 119 bp, homo sapiens
gaacataaaatgtaaaataacattctggaaacaagtataaatattacatttattctgagtccagatacttctaaactgtagaagtgcaggatggatttgacttatccattagtaataca

SEQ ID NO: 18238 - DNA, 119 bp, homo sapiens
ccagatactttctaaactgtagaagtgcaggatggatttgacttatccattagtaatacagactcatgaaagttatgctgcaaaaaatgctgaacctcctctgataaatgatctttaag

SEQ ID NO: 18239 - DNA, 119 bp, homo sapiens
gactcatgaaaagttatgctgcaaaaaatgctgaacctcctctgataaatgatctttaagatggagagatgaggaagctaagtgaatgttcatgttcactgctgtaaattttccttata

SEQ ID NO: 18240 - DNA, 119 bp, homo sapiens
atggagagactgaggaagctaagtgaatgttcatgttcactgctgtaaattttccttataattggtaaaaggctacccataatagaattcacattttcaatgaatttatagtttatcat

SEQ ID NO: 18241 - DNA, 119 bp, homo sapiens
attggtaaaaaggctacccataatagaattcacattttcaatgaatttatagtttatcatcaaatagagaaatgaattaagatttcatttttaaaaataaagagacatatttatttgta

SEQ ID NO: 18242 - DNA, 119 bp, homo sapiens
caaatagagtaaatgaattaagatttcatttttaaaaataaagagacatatttatttgtaataactctcttttttggtaataactatctttaacaatgctattatttatttttacccat

SEQ ID NO: 18243 - DNA, 119 bp, homo sapiens
ataactctctttttttggtaataactatctttaacaatgctattatttatttttacccatggggaatgctaagtacaaacattgttagcttatttaacatttattaaaaatacagactc

SEQ ID NO: 18244 - DNA, 119 bp, homo sapiens
ggggaatgcataagtacaaacattgttagcttatttaacatttattaaaaatacagactctttatactatgcagaaggataagcctcttcttcccactctaaaaatctcttctttgctg

SEQ ID NO: 18245 - DNA, 119 bp, homo sapiens
tttatactaatgcagaaggataagcctcttcttcccactctaaaaatctcttctttgctgtaaagaatttcagtgcatgtgagctaagactctggagcactcagtagagaggtgtgtgg

SEQ ID NO: 18246 - DNA, 119 bp, homo sapiens
taaagaattctcagtgcatgtgagctaagactctggagcactcagtagagaggtgtgtgggatgaccagcagaatcactaggttttctctgttttcaactagctgaaaataggaactct

SEQ ID NO: 18247 - DNA, 119 bp, homo sapiens
gatgaccagacagaatcactaggttttctctgttttcaactagctgaaaataggaactctagttctaaaattcaaagtctaaatattagaaaaataaggagaggggatatgacaaaatg

SEQ ID NO: 18248 - DNA, 119 bp, homo sapiens
agttctaaatattcaaagtctaaatattagaaaaataaggagaggggatatgacaaaatgcttttcaaatacatgcctgaggtgagactgcttgtatgtttgcatgtggtagcttccag

SEQ ID NO: 18249 - DNA, 119 bp, homo sapiens
cttttcaaaatacatgcctgaggtgagactgcttgtatgtttgcatgtggtagcttccagaggaaatctcagttttaatcttcaggttcatatctggagatataaattaagaacacaat

SEQ ID NO: 18250 - DNA, 119 bp, homo sapiens
acagacaaatcccttaaacatggtcttctgaccttttcagccatgtgcagctgctcctgaaccctgagtgatcgtgcttggctgtcgccagattctcctccagtgacttctggttttct

SEQ ID NO: 18251 - DNA, 119 bp, homo sapiens
gtcttgtcattaagtgtcttctgaaactcactctttaaggcagcgacagtgttttctaagttacttaagcttgggcctttataaaatcctatgaaaaataaatgcatgcatgtaatttc

SEQ ID NO: 18252 - DNA, 119 bp, homo sapiens
gttgcaagttcaaattttattaccggttttcaagttcagagatgtctgtctgtagcttaagataccactctcagcttgtgcaaacagctgtcgcagaagtaacacattggtataggcag

SEQ ID NO: 18253 - DNA, 119 bp, homo sapiens
tgttgatgagctcagattccacctcactatgaaccacagcttgtaatccattgaggacttcagagacttatctatggtgaaggtgtcctccaccagcctgaaaaacaaccatgatccaa

SEQ ID NO: 18254 - DNA, 119 bp, homo sapiens
tggctaccagaaagaatccatgttcctatttggtttgcttagagtcctcctctgatacctgctctccttaggtcttggaagcaggaatctacagttttgagtctcaagcctctctttga

SEQ ID NO: 18255 - DNA, 119 bp, homo sapiens
gctctccttgaggtcttggaagcaggaatctacagttttgagtctcaagcctctctttgaacgagcaaacgcatataattaataacttcattttgatggtgctcatttaggcccaactc

SEQ ID NO: 18256 - DNA, 119 bp, homo sapiens
acgagcaaaacgcatataattaataacttcattttgatggtgctcatttaggcccaactctgcctgaaaagaaagaggtaatttaattgttagttttgaagatctgatcaaagagccaa

SEQ ID NO: 18257 - DNA, 119 bp, homo sapiens
gtgcgcggtgcggcgcctgagggtcggttactcaccatggcggcaggcagcggcggcagcctaaaggaagggagaggccaggcggtgccccgccaagcctgggatcgccgagggtagtt

SEQ ID NO: 18258 - DNA, 119 bp, homo sapiens
ctaaaggaacgggagaggccaggcggtgccccgccaagcctgggatcgccgagggtagttggaccacagaaatggggaaggagggtaggttgtttagaagcctctggttgctaacggaa

SEQ ID NO: 18259 - DNA, 119 bp, homo sapiens
ggaccacagaaaatggggaaggagggtaggttgtttagaagcctctggttgctaacggaaaccgaggcagtggactgcaattatgcattttcattggtcctcaggatcacgcgacagga

SEQ ID NO: 18260 - DNA, 119 bp, homo sapiens
gggagaagacagcacctgccccactgacctggaagacggacgttttggcctcccagaaatggcttcctttctcctccgaggctcagtcagagtcggccttgggagcagaaagcggggga

SEQ ID NO: 18261 - DNA, 119 bp, homo sapiens
ggcttccttctctcctccgaggctcagtcagagtcggccttgggagcagaaagcgggggagacctcctgaatcattttttctgtgatgattctatggacccacaggcccgaagacagac

SEQ ID NO: 18262 - DNA, 119 bp, homo sapiens
gacctcctgaaatcattttttctgtgatgattctatggacccacaggcccgaagacagacctgtcctagaacaaggacttccttttggtaaggacactcatgcatctcaggttttgttc

SEQ ID NO: 18263 - DNA, 119 bp, homo sapiens
ctgtcctagaaacaaggacttccttttggtaaggacactcatgcatctcaggttttgttcattttttagtaaaaaagacttaattcattcaaggctttagatggggctgtcaactctta

SEQ ID NO: 18264 - DNA, 119 bp, homo sapiens
attttttagctaaaaaagacttaattcattcaaggctttagatggggctgtcaactcttagataacctcgtgccagcatggtgggaggtgtgaggaaaccacactagtctccgacctcc

SEQ ID NO: 18265 - DNA, 119 bp, homo sapiens
aatacccatagaatatacaaaaaagaaactaacagaaaacaatttaaaatattttaaatgacaaaacaataaatgacaattaacaataatgttagcctataaagctattttctaaaaca

SEQ ID NO: 18266 - DNA, 119 bp, homo sapiens
atgtttagcttgatagaaggcagctgaattaccatacctgcttctgcattcaacttgctgcaatacatgtgtaaaacctggcttcacacaggtagatatttggaaaaagaggggtattt

SEQ ID NO: 18267 - DNA, 119 bp, homo sapiens
caatacatgttgtaaaacctggcttcacacaggtagatatttggaaaaagaggggtatttaatagcttttcagatgatagtgtgcttttatattataccaaacattgatgaagtagttg

SEQ ID NO: 18268 - DNA, 119 bp, homo sapiens
aatagctttttcagatgatagtgtgcttttatattataccaaacattgatgaagtagttgaaggatactgttcttagtcaattctcataaaaattatctcttaaaactatgacattatt

SEQ ID NO: 18269 - DNA, 119 bp, homo sapiens
aaggatactggttcttagtcaattctcataaaaattatctcttaaaactatgacattattggagcacaaaccaaaaactaatcaggtctctgtaccatggttcttacaaatttaagatg

SEQ ID NO: 18270 - DNA, 119 bp, homo sapiens
ggagcacaataccaaaaactaatcaggtctctgtaccatggttcttacaaatttaagatgagccttctaaggccggagtcatattcccttactttcctgcccaaagcatccattcctgt

SEQ ID NO: 18271 - DNA, 119 bp, homo sapiens
agccttctagaggccggagtcatattcccttactttcctgcccaaagcatccattcctgtttcttcctcaaggcttcaggctacagggcagaagacagaagatctcctggcctccatga

SEQ ID NO: 18272 - DNA, 119 bp, homo sapiens
ttcttcctccaaggcttcaggctacagggcagaagacagaagatctcctggcctccatgaaactttgctatttagagattcagggttggtaaaaggtagttggtttttcttttcactcc

SEQ ID NO: 18273 - DNA, 119 bp, homo sapiens
aactttgcttatttagagattcagggttggtaaaaggtagttggtttttcttttcactcctaggctaaacctgcataggtgttttaaaatagggttcataattgagttctcaggtgaga

SEQ ID NO: 18274 - DNA, 119 bp, homo sapiens
taggctaaaccctgcataggtgttttaaaatagggttcataattgagttctcaggtgagactgattttctctcaatgaaaagatttttttttttcctattagattcatctgtatatggt

SEQ ID NO: 18275 - DNA, 119 bp, homo sapiens
ctgattttcttctcaatgaaaagatttttttttttcctattagattcatctgtatatggttgtttctcaaactcagagggtaataaaggaggaggcaagatagagggtttttattgaaa

SEQ ID NO: 18276 - DNA, 119 bp, homo sapiens
tgtttctcaaaactcagagggtaataaaggaggaggcaagatagagggtttttattgaaagtaggttatcaaacttggcttgaaaggtacttatcattttaaaaattatgcctaatgat

SEQ ID NO: 18277 - DNA, 119 bp, homo sapiens
gtaggttatgcaaacttggcttgaaaggtacttatcattttaaaaattatgcctaatgatgcatcaaatcaaaaacatataatacatcaatagtcaaccctttccccataaaggcaaag

SEQ ID NO: 18278 - DNA, 119 bp, homo sapiens
gcatcaaatacaaaaacatataatacatcaatagtcaaccctttccccataaaggcaaagttactgagaatgtttatttttcctctggtaatggctaatccaggtaataatatgaaagc

SEQ ID NO: 18279 - DNA, 119 bp, homo sapiens
ttactgagaaatgtttatttttcctctggtaatggctaatccaggtaataatatgaaagcaaatggaaattcacattgcttctttcattgcttctgtcccttaaacctgttaatctttc

SEQ ID NO: 18280 - DNA, 119 bp, homo sapiens
aaatggaaaattcacattgcttctttcattgcttctgtcccttaaacctgttaatctttcagaaccacatactgaggtgctggcctgtgcatggaaacccaatgatatccaggtcttac

SEQ ID NO: 18281 - DNA, 119 bp, homo sapiens
agaaccacattactgaggtgctggcctgtgcatggaaacccaatgatatccaggtcttacaggtccaggcccagtggacagacaggccctggtcctccacgctggccaccatgtcttcg

SEQ ID NO: 18282 - DNA, 119 bp, homo sapiens
aggtccagggcccagtggacagacaggccctggtcctccacgctggccaccatgtcttcgatggcattcagtccagcttgctgaggatgctgccagtgctctcagacacgctgtccaca

SEQ ID NO: 18283 - DNA, 119 bp, homo sapiens
atggcattccagtccagcttgctgaggatgctgccagtgctctcagacacgctgtccacaccgcccacccaaaaggatgctctggctcttcctcttcagttggagacaagtcctattaa

SEQ ID NO: 18284 - DNA, 119 bp, homo sapiens
ctagacaaacaaaatctagaacaatgcttacttgtagaagggaattgtgactctcatgaagaatcttatgatttctgaaggtatcgtccagggactcaccacagtctcctctctttcat

SEQ ID NO: 18285 - DNA, 119 bp, homo sapiens
actctacacacacctgcttggtttgaggtgcaagcccagcacttccatgtttttttgtatgctgcagacatgacacggagcattagagccttttaagggataagaacaaagcacacatt

SEQ ID NO: 18286 - DNA, 119 bp, homo sapiens
ggagacaagaaggaataggtccaaatcagacaatttataaaaaagctttaagtcttaccatgtggccaagtgagccttgaggttgcccaaaagacttcctcttatggatataactcggt

SEQ ID NO: 18287 - DNA, 119 bp, homo sapiens
tgtggccaaggtgagccttgaggttgcccaaaagacttcctcttatggatataactcggtttggacataatttgacttttccaggtcgatttattagaaaactgtgaccatgttgattc

SEQ ID NO: 18288 - DNA, 119 bp, homo sapiens
ttggacatatatttgacttttccaggtcgatttattagaaaactgtgaccatgttgattctctctatagagaaatcacataattattacattcccagaatctcatatcagcgataaact

SEQ ID NO: 18289 - DNA, 119 bp, homo sapiens
ttatcttgccaaatggcatgtgaaaccttgtcttaccctcttggagaagggcagtgttgacaactggaaactgagtagggctgggtttgttaggcaatggtttctgtggtagagttggt

SEQ ID NO: 18290 - DNA, 119 bp, homo sapiens
caactggaagactgagtagggctgggtttgttaggcaatggtttctgtggtagagttggtagctgtactactcagataacagttcattcatcagaccgtacgcttgtgagattcgacga

SEQ ID NO: 18291 - DNA, 119 bp, homo sapiens
agctgtactgactcagataacagttcattcatcagaccgtacgcttgtgagattcgacgactatagtgtcagagagcagcaatctgtagacaaagaattaagcatcatttattaagagt

SEQ ID NO: 18292 - DNA, 119 bp, homo sapiens
ttctgtaattccattacccttgacatggcagacttactggattgcttctgggacagaaaggatcatgttttgccctctcttttctgccagctcatttaagtactttgccattctttctt

SEQ ID NO: 18293 - DNA, 119 bp, homo sapiens
gatcatgttcttgccctctcttttctgccagctcatttaagtactttgccattctttcttttcgttttctttcatccaggcttgaatctctcttctttccttgtcagttctttgtgaat

SEQ ID NO: 18294 - DNA, 119 bp, homo sapiens
ttcgttttcttttcatccaggcttgaatctctcttctttccttgtcagttctttgtgaatgtctgccagataatgctgaattctgagaaatttaacaagcaagacatcatttgctttta

SEQ ID NO: 18295 - DNA, 119 bp, homo sapiens
cattcttgaatgagaagcattttaaacaggttaaaaatgaattattcaatgattacctggaggtgcccaagcttgttctgttaagccaagttcttcactggaaactccgtctttaatta

SEQ ID NO: 18296 - DNA, 119 bp, homo sapiens
aggtgcccatagcttgttctgttaagccaagttcttcactggaaactccgtctttaattataaggtcataataatgtctgcaatatcagtcaatccagtcatctggagcggatgtactg

SEQ ID NO: 18297 - DNA, 119 bp, homo sapiens
taaggtcatcaataatgtctgcaatatcagtcaatccagtcatctggagcggatgtactgaaacacttctttgcaaatgtaatttaagaaatataaatcagtatctacaacttaattac

SEQ ID NO: 18298 - DNA, 119 bp, homo sapiens
agagtatgtgtaaatgaaaaagtaaagaacaataccaggagaagtagtattctgatcactggaactggaaggctgacagctgaatcggcagtaggaaacacacaggttttctgaccaga

SEQ ID NO: 18299 - DNA, 119 bp, homo sapiens
ataattttctgttattgaaaattcaggttctgaagtctcctttttgtcactttgatcttcttcatccattgggtcaaaaaacgcactaatccagagtatatattacaattaaaataaaa

SEQ ID NO: 18300 - DNA, 119 bp, homo sapiens
aactaaaaataaaggtagtctaccttatcacaatgtagatctagcatttcaggcttggggaaatcctgtctatgttttcagcaatgttctgtattgctagcaactgctcgtcaattttc

SEQ ID NO: 18301 - DNA, 119 bp, homo sapiens
aaatcctgttctatgttttcagcaatgttctgtattgctagcaactgctcgtcaattttctgaagcttacactgagatgctctagttggtgagctgcagagcttggtgcagggcaagct

SEQ ID NO: 18302 - DNA, 119 bp, homo sapiens
tgaagcttagcactgagatgctctagttggtgagctgcagagcttggtgcagggcaagctgcagagacacttgcagccgtttccacaatagataatcttctgcagagtctgactttgtg

SEQ ID NO: 18303 - DNA, 119 bp, homo sapiens
gcagagacaccttgcagccgtttccacaatagataatcttctgcagagtctgactttgtgctctgtccttgaatcggaactctggttttggcagacctaaatattaataagaataaaag

SEQ ID NO: 18304 - DNA, 119 bp, homo sapiens
taaagaacttttcaaattatatttgttttaaaagtaggaaaaaattaccttgactcttaaaattatgtggggaacagcattagtaactgaagctgccatataatgtaactctgcagacg

SEQ ID NO: 18305 - DNA, 119 bp, homo sapiens
aattatgtgggggaacagcattagtaactgaagctgccatataatgtaactctgcagacgatggaactgtagatgatcgctttgctgtttgataacattatcatttgaaggctcttctc

SEQ ID NO: 18306 - DNA, 119 bp, homo sapiens
atggaactgctagatgatcgctttgctgtttgataacattatcatttgaaggctcttctctcacaggtattcctgtagaagatcattagcttcaatgtcaatcacatttatataagtat

SEQ ID NO: 18307 - DNA, 119 bp, homo sapiens
atgaccataatacattttagcgcaaaggtattattaaaacttctgaataaaacacaaaccaagtttgttctgtatgaggtattgagggtgaccaaggtttctctgacatttcactggaa

SEQ ID NO: 18308 - DNA, 119 bp, homo sapiens
aagtttgttactgtatgaggtattgagggtgaccaaggtttctctgacatttcactggaaagcttcagattagatagacatctgggaccaagagctgaggagcagtcaaaggctcatgt

SEQ ID NO: 18309 - DNA, 119 bp, homo sapiens
agcttcagatttagatagacatctgggaccaagagctgaggagcagtcaaaggctcatgttctgaaaataaaaaagaaataatcaggaacattcaaaaaaaggctgtaaactgctccaa

SEQ ID NO: 18310 - DNA, 119 bp, homo sapiens
ccaaactcagtgtacatgcaaaccagggaagaatctatagcagtttttctataccttgggtttcttaatatttctgaatcatcattattaattatggaattctctggtcgaaaagtcac

SEQ ID NO: 18311 - DNA, 119 bp, homo sapiens
tttcttaatgatttctgaatcatcattattaattatggaattctctggtcgaaaagtcacatttggtttctcctcagtttctcacatcttttttcttgcagctctttctcagctcttct

SEQ ID NO: 18312 - DNA, 119 bp, homo sapiens
atttggttttctcctcagtttctcacatcttttttcttgcagctctttctcagctcttcttctttgcctttaaacataatagcataaaacatacttttacaactatagcaacatttgct

SEQ ID NO: 18313 - DNA, 119 bp, homo sapiens
tatgatattatcaaataaaatttcacttaagccttgcctttttttactgtcctttccttgtcttacttcggtggttctattttgacctttagaagttgaaggtgtccagcatcaccttg

SEQ ID NO: 18314 - DNA, 119 bp, homo sapiens
tcttacttcaggtggttctattttgacctttagaagttgaaggtgtccagcatcaccttgttcaaataattatgtgttagtttctgttggctttgtttaaacgcaatgaggttttcaag

SEQ ID NO: 18315 - DNA, 119 bp, homo sapiens
ttcaaataaattatgtgttagtttctgttggctttgtttaaacgcaatgaggttttcaagtgggataagtgtgtttttttgcactacaagaaagaaacaaagcataagaatgacaaatt

SEQ ID NO: 18316 - DNA, 119 bp, homo sapiens
tcttctgctataggttggataggtgttgagggaactgtaatagatgctcttgaggttgatggaaacatataggaggtttaagtggcaggtatagtaacggaagtccaaaggaatggtga

SEQ ID NO: 18317 - DNA, 119 bp, homo sapiens
ggaaacatattaggaggtttaagtggcaggtatagtaacggaagtccaaaggaatggtgaggagatatccaagggtccctggcttaacatcaaatagtttttctggttttataaacact

SEQ ID NO: 18318 - DNA, 119 bp, homo sapiens
ggagatatctcaagggtccctggcttaacatcaaatagtttttctggttttataaacactgaagagtccgttgaggtgtcaaattttcttgtccaacatattgatccaagttcacatga

SEQ ID NO: 18319 - DNA, 119 bp, homo sapiens
gaagagtcctgttgaggtgtcaaattttcttgtccaacatattgatccaagttcacatgattaggaattctgtaattacagtttctgcccacgtcttctgctcaacttctttttttctg

SEQ ID NO: 18320 - DNA, 119 bp, homo sapiens
ttaggaatttctgtaattacagtttctgcccacgtcttctgctcaacttctttttttctggcttcagtgtatactggcttacattcaaatgggatgctggagtagtttgtgctgctctc

SEQ ID NO: 18321 - DNA, 119 bp, homo sapiens
gcttcagtgttatactggcttacattcaaatgggatgctggagtagtttgtgctgctctctgtggcagacaggttggaaggagtcagataatccccaagcctctcttggttgtggcaaa

SEQ ID NO: 18322 - DNA, 119 bp, homo sapiens
tgtggcagagcaggttggaaggagtcagataatccccaagcctctcttggttgtggcaaaggcctgaaggaacttgtggaatacttcctgtatgtaagaaaaggggctggaattcttgt

SEQ ID NO: 18323 - DNA, 119 bp, homo sapiens
ggcctgaagggaacttgtggaatacttcctgtatgtaagaaaaggggctggaattcttgtttagacttaattgaagcaaaggaaagccatcaccaggactaaatgtttttgcatgtggg

SEQ ID NO: 18324 - DNA, 119 bp, homo sapiens
ttagacttaaattgaagcaaaggaaagccatcaccaggactaaatgtttttgcatgtgggataagtctagtgccttctgaacaacagaaggtgtggacaaaaggtagaggtgagtattt

SEQ ID NO: 18325 - DNA, 119 bp, homo sapiens
ataagtctaggtgccttctgaacaacagaaggtgtggacaaaaggtagaggtgagtatttccagcaggactggataaaacgaagtggatggtaagttttgagatgatggaattggtcct

SEQ ID NO: 18326 - DNA, 119 bp, homo sapiens
gggctgttcttgcgaggctctctggcgttctctcccattgactgtggtttaataaaaaatctctccttagatttttgttgctgtcttcaacatcaccacatcctcttaggtttgattct

SEQ ID NO: 18327 - DNA, 119 bp, homo sapiens
ctctccttaagatttttgttgctgtcttcaacatcaccacatcctcttaggtttgattcttggctttccctaaatgcacagactgagactgctgtacaagttgttgtgtatctgggaga

SEQ ID NO: 18328 - DNA, 119 bp, homo sapiens
ttacttatatagagatgtgcttacctgaactaatttaaacatttcatcttgcagcatctgcctaacggatccgaacaatctggtaactgagccgtgaattcatttctctgggtcttctg

SEQ ID NO: 18329 - DNA, 119 bp, homo sapiens
aggtgttggagcaggtggttgtgaagcaacattgactccatttgatatcagaagtggaactgaggaagattttctttatatgtagaaatctgtgcactgcgtggaaagcatttaaataa

SEQ ID NO: 18330 - DNA, 119 bp, homo sapiens
ataaagccaaaaaaatagattatctaaatgaactgaccttcatagtctgatatgtgcatatccatttcccttctgtaaatgcttctacttctaaaagattctcatcaatatctataaat

SEQ ID NO: 18331 - DNA, 119 bp, homo sapiens
tccatttcctcttctgtaaatgcttctacttctaaaagattctcatcaatatctataaattcttttttatattatgagtgatggaaataatatcatcattgatttcttttatatcagga

SEQ ID NO: 18332 - DNA, 119 bp, homo sapiens
tcttttttagtattatgagtgatggaaataatatcatcattgatttcttttatatcaggattttttgctcagttggcattctactgaaaaaaatgcagcaactaaaattacaactattc

SEQ ID NO: 18333 - DNA, 119 bp, homo sapiens
aactacatgtcttatattgaaaagaagagtataatcggcaacttacttcaagatattttgacaagatttttctgaccatttctttcctcagttccacctggagttgctactgcaactga

SEQ ID NO: 18334 - DNA, 119 bp, homo sapiens
acaagatttattctgaccatttctttcctcagttccacctggagttgctactgcaactgaaccgccagctctgatttgctctccctctcaatattgggtccaatctgacacccagtgtc

SEQ ID NO: 18335 - DNA, 119 bp, homo sapiens
accgccagcatctgatttgctctccctctcaatattgggtccaatctgacacccagtgtcacgattctcaccatctaaagcaaaccatttaaagtatttagtatttattgaacccttta

SEQ ID NO: 18336 - DNA, 119 bp, homo sapiens
atatgcttaccttaataatggcattttttgccttatatgtagcaaaatagggttgttccaaaagccatatgatgtaagaatggcagctgtagaggtctttacacgaattactggactgt

SEQ ID NO: 18337 - DNA, 119 bp, homo sapiens
aaagccataatgatgtaagaatggcagctgtagaggtctttacacgaattactggactgtactcagaggtgactcagttataccagaatcacagagtagccttctattagaccacctta

SEQ ID NO: 18338 - DNA, 119 bp, homo sapiens
actcagaggatgactcagttataccagaatcacagagtagccttctattagaccaccttatcatccattcagcagtcttcctatactgccaaaagtgtttagtgctaaaggaagatctt

SEQ ID NO: 18339 - DNA, 119 bp, homo sapiens
tcatccattccagcagtcttcctatactgccaaaagtgtttagtgctaaaggaagatcttcttgagggtaatatcattgcactgaatagctttgaaaatacatcttctagttttaatgg

SEQ ID NO: 18340 - DNA, 119 bp, homo sapiens
cttgagggttaatatcattgcactgaatagctttgaaaatacatcttctagttttaatggacttgggagccaaaaaatgtggtttgatgatctctggattagacatttctctctagtgt

SEQ ID NO: 18341 - DNA, 119 bp, homo sapiens
catcttgtattttgtaaattgacctttgttttaaaccaaataatccactcattccttcattcttattgattcattcgaaggatattgtaaaaaaggtttgatcccttgattaaccagta

SEQ ID NO: 18342 - DNA, 119 bp, homo sapiens
tcttattgacttcattcgaaggatattgtaaaaaaggtttgatcccttgattaaccagtactgatgatgaagtttctggttttctaaatgcatgccatattcatcatttaaagaggatg

SEQ ID NO: 18343 - DNA, 119 bp, homo sapiens
ctgatgatgaaagtttctggttttctaaatgcatgccatattcatcatttaaagaggatgatttttctgttcataggactcaggagcaacaacaaagcaagaaccagctctaaacacat

SEQ ID NO: 18344 - DNA, 119 bp, homo sapiens
atttttctgattcataggactcaggagcaacaacaaagcaagaaccagctctaaacacattctggctttagttttgctctgatgtcgttttaatgttgtatgtacatcaaaaagtaaag

SEQ ID NO: 18345 - DNA, 119 bp, homo sapiens
tctggcttttagttttgctctgatgtcgttttaatgttgtatgtacatcaaaaagtaaagaattaagttatgttctctaagctttccagaaaaactagttagaaatggaatgtcagcat

SEQ ID NO: 18346 - DNA, 119 bp, homo sapiens
aattaagttcatgttctctaagctttccagaaaaactagttagaaatggaatgtcagcatccctggaataggtaggtctctttcaagaatgtaactcaaaaacagatcaaggaatttaa

SEQ ID NO: 18347 - DNA, 119 bp, homo sapiens
ccctggaataaggtaggtctctttcaagaatgtaactcaaaaacagatcaaggaatttaatatattcatatcatcacgttcaaattcccaaacacctattacaggaagtgtattttgtg

SEQ ID NO: 18348 - DNA, 119 bp, homo sapiens
tatattcatcatcatcacgttcaaattcccaaacacctattacaggaagtgtattttgtgataacttttatgatcttctttctttgtaggattttctttctgattacacattttccttt

SEQ ID NO: 18349 - DNA, 119 bp, homo sapiens
ataacttttcatgatcttctttctttgtaggattttctttctgattacacattttccttttatcagttgcttatgaattgatgttaattccatgtgatttggggcatttctatagcaaa

SEQ ID NO: 18350 - DNA, 119 bp, homo sapiens
gtacctttgatagatatttatcctacttttttcttcaaccgacaaagcttcagagaacgtatctgcatcctgtgaaccacagaatctcctagttctgtgagtgtacttctgctcaaact

SEQ ID NO: 18351 - DNA, 119 bp, homo sapiens
atctgcatcactgtgaaccacagaatctcctagttctgtgagtgtacttctgctcaaactagtccccaggaatatctgtcaacacctggagcctcatctggtttctcttcttcaattgg

SEQ ID NO: 18352 - DNA, 119 bp, homo sapiens
agtccccagggaatatctgtcaacacctggagcctcatctggtttctcttcttcaattggttcccatatttcacttcaaaagagcctatatttctctgcacacgttttagagctttcac

SEQ ID NO: 18353 - DNA, 119 bp, homo sapiens
ttcccatatattcacttcaaaagagcctatatttctctgcacacgttttagagctttcaccctcacttttggatagaatgcatgacaacagacatcatttcctcagtctggggtcctgg

SEQ ID NO: 18354 - DNA, 119 bp, homo sapiens
ctgattctgatgtagtttactttcacctacaagcacattacctttctgattggtggcagttctccaataggctcaaaattatatcctgaataagttcttccatattaaaaaaccgagag

SEQ ID NO: 18355 - DNA, 119 bp, homo sapiens
tctccaataaggctcaaaattatatcctgaataagttcttccatattaaaaaaccgagagaaaggcagcttctataagcccattccactgcactaagacagtgctcaatcatacaagaa

SEQ ID NO: 18356 - DNA, 119 bp, homo sapiens
aaaggcagcattctataagcccattccactgcactaagacagtgctcaatcatacaagaatcaaactcccttcaaggtcctaaaaggatattgaaaaacattcatttcctttttagttt

SEQ ID NO: 18357 - DNA, 119 bp, homo sapiens
aaaaatataccatcattcatactctaagcaagcagttcattttggacaaacctattgctctaatggaaattcatcaagcttgtggtctccagctgctccaggtctaaaaaatgcgatac

SEQ ID NO: 18358 - DNA, 119 bp, homo sapiens
taatggaaacttcatcaagcttgtggtctccagctgctccaggtctaaaaaatgcgatacctcctttacgtaattaagtaatgactgaggaaaaggactcagtgaaggaagggatcctt

SEQ ID NO: 18359 - DNA, 119 bp, homo sapiens
ctcctttacagtaattaagtaatgactgaggaaaaggactcagtgaaggaagggatcctttcattcgaactaaaagtaaagaataaccgaacatgttaattatcagctgtataaatcac

SEQ ID NO: 18360 - DNA, 119 bp, homo sapiens
gttaacacagcatgtaaatgactaagatatttccataccttctgcatgacttttcttgcccacctcaacgcaatatataccactgtgctacaggaaaagaacactgagccgcccggaaa

SEQ ID NO: 18361 - DNA, 119 bp, homo sapiens
cacctcaactgcaatatataccactgtgctacaggaaaagaacactgagccgcccggaaaagcaggagacacgctgaaggattccagataccttctggcgattatttttttcagctttt

SEQ ID NO: 18362 - DNA, 119 bp, homo sapiens
agcaggagaacacgctgaaggattccagataccttctggcgattatttttttcagcttttaaaagaagacatcaccatcttcctgaggaaaataaaacaatccattttagtggctagta

SEQ ID NO: 18363 - DNA, 119 bp, homo sapiens
tataagcttacttcactaagaatagctggctggggacagtacaatggaggagctggaagatacaagccgatggcactaagccccacagtcttttactgaagtccttggcagagtctatc

SEQ ID NO: 18364 - DNA, 119 bp, homo sapiens
agaagttgaaatgtctccgaaagaatatctgcatcggccataactgatgctttcagtacttcttgtactaaccaaatagcagatttgcatcttcctcttcaatgggatctatcaaatac

SEQ ID NO: 18365 - DNA, 119 bp, homo sapiens
taaggtttatattaatctgacacgaatcagactatacatacataacacacctgtaaactgtttatatttgagcccatttcattttttgcttccaaagaggctggttgacctaaaacaca

SEQ ID NO: 18366 - DNA, 119 bp, homo sapiens
tttatattttgagcccatttcattttttgcttccaaagaggctggttgacctaaaacacactgcagttttcctgaaaaatctgtgctggagtcatacggagtggtagattcagactctt

SEQ ID NO: 18367 - DNA, 119 bp, homo sapiens
ctgcagtttttcctgaaaaatctgtgctggagtcatacggagtggtagattcagactctttttcttggactgaaatgacatcaaattaagggaaatgaatccaaattttgaaaaaaaag

SEQ ID NO: 18368 - DNA, 119 bp, homo sapiens
ccatacctcatgaaattgctatcacgtttacagaacagctggaaagccacaccaattgaaacagacgtctccagtctccaagtttatatgccaaccacacagcctctggaaccaggcca

SEQ ID NO: 18369 - DNA, 119 bp, homo sapiens
ccaataaatagtaattcaagtgcatattcaactgtccacacattagagagattctgatctctaacaacatggccaccttagagtgttgcagaggaataagtcgaaaggactgctctgtg

SEQ ID NO: 18370 - DNA, 119 bp, homo sapiens
aaaagtttaaaaaggatttgtttactacattacctgttttaatatgaagtgggggaagaacattcacatatgagggggcaaaatgcaaagctgctgattggtgaaataggcagccatga

SEQ ID NO: 18371 - DNA, 119 bp, homo sapiens
aacgagccatggactggacgactctcactgctgcctcaggatgaacaccgcccaccattccacactcaaatgagactttgcagcacctaaggaatacagcaatgacctaagaagattgt

SEQ ID NO: 18372 - DNA, 119 bp, homo sapiens
caaagaaagaaaaaaaaaagcatacctgaaaaatctttattttcttttacaggtagttgggaccatctcggatttctcttgctagctgatcacacaatccttgagcatcatttaaatta

SEQ ID NO: 18373 - DNA, 119 bp, homo sapiens
gaccatctcaggatttctcttgctagctgatcacacaatccttgagcatcatttaaattatagctatagggtggcagtataagagagaaagataatagcgtatctgaagaaaatacgtc

SEQ ID NO: 18374 - DNA, 119 bp, homo sapiens
tagctatagaggtggcagtataagagagaaagataatagcgtatctgaagaaaatacgtccttcttcctctgaaacaagaagtaagctcaccttaaaagtatgtaagcaaaggaatgcc

SEQ ID NO: 18375 - DNA, 119 bp, homo sapiens
ttcataagatactgaccattgatagatttaagttctaaggtttgattcaagcaatctccagtactctgtggttagcctgcaaatgacataacagggacttgacagtagatgcttcatgt

SEQ ID NO: 18376 - DNA, 119 bp, homo sapiens
gtcatcttttcagttaactgactatcagcttcaggaactcttcgatttaattgtgcttgataccataaatttttttgtacagtattctccagagaataagcaatctgcacataaaatca

SEQ ID NO: 18377 - DNA, 119 bp, homo sapiens
aaagtcataattgttccaagtaaataaaattctgctgctaagtacctgaaaatctgctgcattttcattattgtttcttctgcctgcaagaatttggggacagtgaaatcggctgaact

SEQ ID NO: 18378 - DNA, 119 bp, homo sapiens
attttcatttattgtttcttctgcctgcaagaatttggggacagtgaaatcggctgaactttcatttcctggtgttctaacaggctagaccttagggaattcagtgatcgcaagttcag

SEQ ID NO: 18379 - DNA, 119 bp, homo sapiens
ttcatttccttggtgttctaacaggctagaccttagggaattcagtgatcgcaagttcagtcctttgcctttggctaaagaagaaaagatgaaagatttccaagagcaaaatgttatct

SEQ ID NO: 18380 - DNA, 119 bp, homo sapiens
ccaatgatataaaaaagcactataccttagacaatatcacactttgatatattttctcaagcctctgggtgaatcaagtagaagtgatctcatgtgtactgatggagataggctatcaa

SEQ ID NO: 18381 - DNA, 119 bp, homo sapiens
gcctctgggttgaatcaagtagaagtgatctcatgtgtactgatggagataggctatcaagaaatcgaaggttgtgaccatatatccatcagatataacgaggtagggtaaccgtgagt

SEQ ID NO: 18382 - DNA, 119 bp, homo sapiens
gaaatcgaagggttgtgaccatatatccatcagatataacgaggtagggtaaccgtgagtgtgcttttaagaaaatctctgtctcatagggtcactatcagaagctgatgaatcaacag

SEQ ID NO: 18383 - DNA, 119 bp, homo sapiens
gtgcttttatagaaaatctctgtctcatagggtcactatcagaagctgatgaatcaacagaattatttgatcttgaaacgtaaactgctgtggtctagtaaacaaacatcaaaatacaa

SEQ ID NO: 18384 - DNA, 119 bp, homo sapiens
aacaaattaacacaattcaaatgtctcacctatacgttattagtggatgaagaggaataaattctgctggccaaattctatagagcaaccaaatgtaattaatgttagcaattcacctt

SEQ ID NO: 18385 - DNA, 119 bp, homo sapiens
ggcaggtcaataaaaccagagagccacgttttaacatacaagccagaaaaagactatcatgcgtccagcgatatcacctacccagtaggacctataataaataagagacaacatgttta

SEQ ID NO: 18386 - DNA, 119 bp, homo sapiens
ccttcttttatagattactttctaagacagatatttactgaccttggggtctttctgattaagagttacgccagggtaaggccatctcttgaaaaggcagaaattagagctcctcttga

SEQ ID NO: 18387 - DNA, 119 bp, homo sapiens
aagagttactgccagggtaaggccatctcttgaaaaggcagaaattagagctcctcttgactttactgatcacatttaggaattaaactacagagatgacagtcttgttgagcccaatg

SEQ ID NO: 18388 - DNA, 119 bp, homo sapiens
ctttactgattcacatttaggaattaaactacagagatgacagtcttgttgagcccaatgaacatggtaggcaatgatctaaaaaagtaatgaaataattgaaaacaaaaggtatagta

SEQ ID NO: 18389 - DNA, 119 bp, homo sapiens
ttacctcattttttataaaaacagcattcactacagcttctttatcttcggtggaaggcaagagaactgttcttcaggtatgacctgggaccaccgacccgccaatgaaaggcttttag

SEQ ID NO: 18390 - DNA, 119 bp, homo sapiens
agagaactgcttcttcaggtatgacctgggaccaccgacccgccaatgaaaggcttttagaagataagaattctttaattccaaatattcccaaagaaatatgcatccagaaggtgtta

SEQ ID NO: 18391 - DNA, 119 bp, homo sapiens
aagataagatattctttaattccaaatattcccaaagaaatatgcatccagaaggtgttatgagcacaatcttttcccatttccagatacatacaagtacagtctcaaagagcttgcta

SEQ ID NO: 18392 - DNA, 119 bp, homo sapiens
agttattaaaaaatatagttttagccatttgaaaatatcagtactacttaaccattactggatgttgttggacaataacatccttcaagaaaggctgcagactaggaattttcttcttt

SEQ ID NO: 18393 - DNA, 119 bp, homo sapiens
gatgttgttaggacaataacatccttcaagaaaggctgcagactaggaattttcttctttatctttcctatagcaaattaatttcatttatgaatttatcatccaaaagaaaaacggct

SEQ ID NO: 18394 - DNA, 119 bp, homo sapiens
atctttcctgatagcaaattaatttcatttatgaatttatcatccaaaagaaaaacggcttctttttccaagagaagaaacatgtgaaggactcaagaggtgccagaaattaattcaac

SEQ ID NO: 18395 - DNA, 119 bp, homo sapiens
aaaacacacatataacatatataaaactggtattgcgtgaataaagaaaaacctacctttcccaaccagagacacgtggccatggttttttctgcttaatacctgttgatgtcaagatt

SEQ ID NO: 18396 - DNA, 119 bp, homo sapiens
cccaaccaggagacacgtggccatggttttttctgcttaatacctgttgatgtcaagatttctaatctttctccatgtttgttaagctatcaatgaccaattaagtaaaacagtcccaa

SEQ ID NO: 18397 - DNA, 119 bp, homo sapiens
tctaatcttatctccatgtttgttaagctatcaatgaccaattaagtaaaacagtcccaagattctgtaacaataatagtaataaaatataaatgatgcataatattcactgggcattt

SEQ ID NO: 18398 - DNA, 119 bp, homo sapiens
gcggggtaaggaatccgcgggcagttacctccgccaggggcagggtccggccagtcaggcgcgagaaggtaggcgaggccgactgcgcggggtgaagacgccaggccgacagctgcggg

SEQ ID NO: 18399 - DNA, 119 bp, homo sapiens
ccctaccgccagccctgacgcgagcctgcgtcctggcgacggcggagggcgggcagggggcgcgggcgcgccacggcgcctgctcagaaccggccgggaacgccgcgggcgggtctccc

SEQ ID NO: 18400 - DNA, 119 bp, homo sapiens
gggctaggcatcactgacacacgcagactccgtggttgaggcattttattggacctttggcaattggtgtggggaggcatctgctccaactggtgcggggccctgcagatgggaccatc

SEQ ID NO: 18401 - DNA, 119 bp, homo sapiens
caattggtggtggggaggcatctgctccaactggtgcggggccctgcagatgggaccatctcaggctggtccttgtagcccaggagcacagactggactaagcctcctgggccttgtat

SEQ ID NO: 18402 - DNA, 119 bp, homo sapiens
tcaggctgggtccttgtagcccaggagcacagactggactaagcctcctgggccttgtatgaaaaaggtttgtacctggccgtttttgccagtaataatcaataaaataaccataataa

SEQ ID NO: 18403 - DNA, 119 bp, homo sapiens
gaaaaaggtgttgtacctggccgtttttgccagtaataatcaataaaataaccataataaaaatcaaagctctgttctgaccactcttcaggtcttccgctgaaacggaaaagtgcaaa

SEQ ID NO: 18404 - DNA, 119 bp, homo sapiens
aaatcaaaggctctgttctgaccactcttcaggtcttccgctgaaacggaaaagtgcaaagcaattgaatacatatgcagtttgtcttaacctcaaatagtgccagtcccacttccttt

SEQ ID NO: 18405 - DNA, 119 bp, homo sapiens
gcaattgaagtacatatgcagtttgtcttaacctcaaatagtgccagtcccacttcctttcctctgatatttgttcagttcagcagatgcagaggggctggcctgttctccttttgatt

SEQ ID NO: 18406 - DNA, 119 bp, homo sapiens
cctctgatagtttgttcagttcagcagatgcagaggggctggcctgttctccttttgatttcctccacaggtcttctcttcggacatccacctggccaggatgggagaagaaggtggta

SEQ ID NO: 18407 - DNA, 119 bp, homo sapiens
atggcatacattctctgtcccttagccttcctgcccacctccctcacctcttccctgctcgtcactgaaggagcttgatgaccccatccttgagttcctgctcgccgatgatagccacc

SEQ ID NO: 18408 - DNA, 119 bp, homo sapiens
gtcactgaacggagcttgatgaccccatccttgagttcctgctcgccgatgatagccaccagtgggatgctgcctcctcacagtactgtaactggttcagtagctttgggttcttcttg

SEQ ID NO: 18409 - DNA, 119 bp, homo sapiens
agtgggatgcctgcctcctcacagtactgtaactggttcagtagctttgggttcttcttgtacagcagccagcctgcaggggacaagagcagaagatgaaggctggcttctgctgtcct

SEQ ID NO: 18410 - DNA, 119 bp, homo sapiens
ctatcttctacctacctcctaggacctacctctagtctctgttccacgatggagaaaatccgctccacccaatgctgagccccacacatggcaccttgcgccctttggggtcgaacatg

SEQ ID NO: 18411 - DNA, 119 bp, homo sapiens
cgctccaccccaatgctgagccccacacatggcaccttgcgccctttggggtcgaacatgcccactagccatcatagcgtcctccagcagccacactgcccacacccaggggctcttcc

SEQ ID NO: 18412 - DNA, 119 bp, homo sapiens
cccactagcccatcatagcgtcctccagcagccacactgcccacacccaggggctcttcccctgcctggctggggtctgtagcagcactgcctcatagatcaccccagtgtagtaatcc

SEQ ID NO: 18413 - DNA, 119 bp, homo sapiens
cctgcctgggctggggtctgtagcagcactgcctcatagatcaccccagtgtagtaatccagccctcgacaaggctcaggtcaaaggagatctgtggagataagaaaatggtcagtgcc

SEQ ID NO: 18414 - DNA, 119 bp, homo sapiens
atcagggacctgaagccccagagctcagaagggatcccgtccccaacttgactcactttgtcatcaatgcaaatagggtcaggtactcaaagagcaacttcaggtctcccaggccctcc

SEQ ID NO: 18415 - DNA, 119 bp, homo sapiens
tcatcaatgccaaatagggtcaggtactcaaagagcaacttcaggtctcccaggccctccaaggcctgctgttttgggatagtttaggatcctggagcagctgttccaccagggatacc

SEQ ID NO: 18416 - DNA, 119 bp, homo sapiens
aaggcctgcttgttttgggatagtttaggatcctggagcagctgttccaccagggataccccacctgggagacagacttgtgagtgaggctgacaaggaaacaaaaaaggtaaggaggg

SEQ ID NO: 18417 - DNA, 119 bp, homo sapiens
gctggcttgagagagccccaagtaactcatcctgccccacggtttcccaacactcacacactggtagaatcccggtatcggccacgggtcatggctgggttatcccgccgatatacctt

SEQ ID NO: 18418 - DNA, 119 bp, homo sapiens
ctggtagaattcccggtatcggccacgggtcatggctgggttatcccgccgatatacctttgctatgtgtagcgtttaatgttggtcagtttattcattgccaaataccgagcaaaagg

SEQ ID NO: 18419 - DNA, 119 bp, homo sapiens
tgctatgtggtagcgtttaatgttggtcagtttattcattgccaaataccgagcaaaaggaacctgatgcaaagagttaaggagaaagcccctcctatcactgtctgcaagttgattat

SEQ ID NO: 18420 - DNA, 119 bp, homo sapiens
tgcctaaatctcaccagctcggcgctggccttctgctgcttgaggcctcgcacgcgctctccctgaagttcaccagctcctccagcgccgcacgctctgccatcccggctgtccacttg

SEQ ID NO: 18421 - DNA, 119 bp, homo sapiens
ccctgaagtttcaccagctcctccagcgccgcacgctctgccatcccggctgtccacttgagccgcctgtgtctcgacctgcggtggttgccccagcctcagcaaggatgacttccggc

SEQ ID NO: 18422 - DNA, 119 bp, homo sapiens
agccgcctgctgtctcgacctgcggtggttgccccagcctcagcaaggatgacttccggctatcgagtcctgggtcgcacgcctagagagcctccgccgagcacaaaaattatttccgg

SEQ ID NO: 18423 - DNA, 119 bp, homo sapiens
ctcctcccggaagtgccgaagctggctactaagggaacttgggaggatcccacctcagccttcgtgactgtgaggtgcgcaaacgcccgagttttccctggtgcgcgggttccgccttt

SEQ ID NO: 18424 - DNA, 119 bp, homo sapiens
ttcgtgactagtgaggtgcgcaaacgcccgagttttccctggtgcgcgggttccgcctttgcagtgcccccacccttcctggtgtctgacccgcctccttcccaggccttttgttcctg

SEQ ID NO: 18425 - DNA, 119 bp, homo sapiens
gcagtgccctccacccttcctggtgtctgacccgcctccttcccaggccttttgttcctgtcccggaaaccggcgtcctgccgcgcgatgcccctgctcggacttcttcccaggagggc

SEQ ID NO: 18426 - DNA, 119 bp, homo sapiens
tcccggaaagccggcgtcctgccgcgcgatgcccctgctcggacttcttcccaggagggcctgggcttcctgctcagccagctcctgcgaccgccctgcgcttcgtgcaccggggcggt

SEQ ID NO: 18427 - DNA, 119 bp, homo sapiens
agaagaagactggagaacaatgttggtaatttcatagttattttaataaccaggtttacattaacagtccgtgatgaacttttttctttaatgtcagctaaactcaaaacacagttttg

SEQ ID NO: 18428 - DNA, 119 bp, homo sapiens
ttaacagtcacgtgatgaacttttttctttaatgtcagctaaactcaaaacacagttttgttcacggttaaaccaaacagctcttcacgttccagagctgcctcacagctagcacagat

SEQ ID NO: 18429 - DNA, 119 bp, homo sapiens
ttcacggttcaaaccaaacagctcttcacgttccagagctgcctcacagctagcacagatcacaggagatactgtctgtccatacccaccagacacagaactgaacacccacacaccag

SEQ ID NO: 18430 - DNA, 119 bp, homo sapiens
cacaggagattactgtctgtccatacccaccagacacagaactgaacacccacacaccagttttcaaaggggaacttacaatgaatgctggctgcccagggcagcccatgagtgtatct

SEQ ID NO: 18431 - DNA, 119 bp, homo sapiens
ttttcaaagagggaacttacaatgaatgctggctgcccagggcagcccatgagtgtatctgggactcaactggagttttccaggggagaaagcctgggaagcttgtggcaaggaagttg

SEQ ID NO: 18432 - DNA, 119 bp, homo sapiens
gggactcaagctggagttttccaggggagaaagcctgggaagcttgtggcaaggaagttgggaattgccaccctactggaaagggcttctcagggatgagtgaaaatccaggctcaggt

SEQ ID NO: 18433 - DNA, 119 bp, homo sapiens
ggaattgcccaccctactggaaagggcttctcagggatgagtgaaaatccaggctcaggtgtcagcccttgtggaaacatgacactctcagtatagacagtcgtgaagaacaaggctga

SEQ ID NO: 18434 - DNA, 119 bp, homo sapiens
gtcagccctttgtggaaacatgacactctcagtatagacagtcgtgaagaacaaggctgagggattttgagtaaacccattttcaggatgactacaatccttccacttctagaaaactt

SEQ ID NO: 18435 - DNA, 119 bp, homo sapiens
gggattttgaagtaaacccattttcaggatgactacaatccttccacttctagaaaacttagaagtacagaaatagctctactacgggtaactgatttaacaatttcccaaacaccctt

SEQ ID NO: 18436 - DNA, 119 bp, homo sapiens
agaagtacaagaaatagctctactacgggtaactgatttaacaatttcccaaacaccctttccactaccaagcccgtggccctcagagagaaccgggatggattgccatctgggttcag

SEQ ID NO: 18437 - DNA, 119 bp, homo sapiens
tccactacccaagcccgtggccctcagagagaaccgggatggattgccatctgggttcagaggcaatataggaggttggggggatggcaggggcatcctcagggttggggggcaggcca

SEQ ID NO: 18438 - DNA, 119 bp, homo sapiens
aggcaatatgaggaggttggggggatggcaggggcatcctcagggttggggggcaggccaagggatgagtggcaaaggacagctttggaatcagatagacgatccagcgtgccttccta

SEQ ID NO: 18439 - DNA, 119 bp, homo sapiens
agggatgagatggcaaaggacagctttggaatcagatagacgatccagcgtgccttcctacacttgcataggtgccagtgaattcgaagagggccgggactcaccattgttttcttttc

SEQ ID NO: 18440 - DNA, 119 bp, homo sapiens
cacttgcatgaggtgccagtgaattcgaagagggccgggactcaccattgttttcttttcctaaacctttgtataggcctgtttgatgtgtcttatgaaacgaaacaaatctgaatata

SEQ ID NO: 18441 - DNA, 119 bp, homo sapiens
ctaaaccttttgtataggcctgtttgatgtgtcttatgaaacgaaacaaatctgaatataaattttaaatagtgggagttattctcgcaattcccagggatttctatgcttggagagtt

SEQ ID NO: 18442 - DNA, 119 bp, homo sapiens
aattttaaaatagtgggagttattctcgcaattcccagggatttctatgcttggagagttagtaatggtagtgaagaaagagaggcttcctgagctcatgttgttcctcccaagggcat

SEQ ID NO: 18443 - DNA, 119 bp, homo sapiens
agtaatggtaagtgaagaaagagaggcttcctgagctcatgttgttcctcccaagggcatttgggggttttcccagagcaaggaaatcttgtgcagaatcaaaggttctggtggaatgg

SEQ ID NO: 18444 - DNA, 119 bp, homo sapiens
ttgggggttgttcccagagcaaggaaatcttgtgcagaatcaaaggttctggtggaatggttcacttcgaagtcccaagggcagtgcggatgaccgatttggccatggaagacttatct

SEQ ID NO: 18445 - DNA, 119 bp, homo sapiens
ttcacttcggaagtcccaagggcagtgcggatgaccgatttggccatggaagacttatcttcatggcacgagaggttgtgcagagatgagtcagactcaggggctgagtaacagcagag

SEQ ID NO: 18446 - DNA, 119 bp, homo sapiens
tcatggcacagagaggttgtgcagagatgagtcagactcaggggctgagtaacagcagagcagagagtgagaagtggacgctcagaagcgagtttatgtgtgtcttttcctctatctgc

SEQ ID NO: 18447 - DNA, 119 bp, homo sapiens
cagagagtgcagaagtggacgctcagaagcgagtttatgtgtgtcttttcctctatctgctggctgtggtggtactgcaacctatcccaaagtaacagcctagtcaatgaggtatatgc

SEQ ID NO: 18448 - DNA, 119 bp, homo sapiens
tggctgtggctggtactgcaacctatcccaaagtaacagcctagtcaatgaggtatatgcttcagatctgcaaactctctctgcacataaaactgttattcttagttctctgaaagacc

SEQ ID NO: 18449 - DNA, 119 bp, homo sapiens
ttcagatctggcaaactctctctgcacataaaactgttattcttagttctctgaaagacccccacatcttgaagtgtaaactaagagctacattttcccttttactacatctcccttaa

SEQ ID NO: 18450 - DNA, 119 bp, homo sapiens
cccacatctttgaagtgtaaactaagagctacattttcccttttactacatctcccttaaaagaaaagcctacaagagctttaaaatagcaagcttccctattctaaggggaaatagtc

SEQ ID NO: 18451 - DNA, 119 bp, homo sapiens
aagaaaagcactacaagagctttaaaatagcaagcttccctattctaaggggaaatagtcttttttcatatttgaacagaaggtagcttgctaggggaaatcctgttccttggctatct

SEQ ID NO: 18452 - DNA, 119 bp, homo sapiens
ttttttcatgatttgaacagaaggtagcttgctaggggaaatcctgttccttggctatctccaaattccttgtagcccagtgtgtacttttctctggtcttcaacttattcaaacctgc

SEQ ID NO: 18453 - DNA, 119 bp, homo sapiens
ccaaattcctttgtagcccagtgtgtacttttctctggtcttcaacttattcaaacctgcagtcagagaaatggtttctcctaagcaattaaaaggtgtctgaggcctgctcttctctt

SEQ ID NO: 18454 - DNA, 119 bp, homo sapiens
agtcagagacaatggtttctcctaagcaattaaaaggtgtctgaggcctgctcttctcttcaaagcactagtacacagggttacaggtgctaccacttggattccccagagcatggaag

SEQ ID NO: 18455 - DNA, 119 bp, homo sapiens
caaagcacttagtacacagggttacaggtgctaccacttggattccccagagcatggaagtctgatcccggttgaacatatttcttctgaaaatgagcatcttggttctatagattctt

SEQ ID NO: 18456 - DNA, 119 bp, homo sapiens
tctgatcccaggttgaacatatttcttctgaaaatgagcatcttggttctatagattcttatcttgctccaggacttgctccaaaactgaattttcagaagcagcatgatagggaaaga

SEQ ID NO: 18457 - DNA, 119 bp, homo sapiens
atcttgctcacaggacttgctccaaaactgaattttcagaagcagcatgatagggaaagagatattcaatctgacagacaaggtagatcgaagcacccacactaatttctttcaggtgc

SEQ ID NO: 18458 - DNA, 119 bp, homo sapiens
gatattcaactctgacagacaaggtagatcgaagcacccacactaatttctttcaggtgccccatgaggagactgcatcatgtcacttccactcacttggggagattctaggactgaga

SEQ ID NO: 18459 - DNA, 119 bp, homo sapiens
cccatgaggaagactgcatcatgtcacttccactcacttggggagattctaggactgagacacaaagttccccagagtttctgctaatggaaggggaaacaggtggtttggaatggaaa

SEQ ID NO: 18460 - DNA, 119 bp, homo sapiens
cacaaagttcccccagagtttctgctaatggaaggggaaacaggtggtttggaatggaaaggtggaaccggtccacaaaatgtgctccctctgctcaagactgactttggctttcccag

SEQ ID NO: 18461 - DNA, 119 bp, homo sapiens
ggtggaaccaggtccacaaaatgtgctccctctgctcaagactgactttggctttcccagttccccactgactttcatataagctgagatgacctattacggtaaaaattagggaacac

SEQ ID NO: 18462 - DNA, 119 bp, homo sapiens
ttccccacttgactttcatataagctgagatgacctattacggtaaaaattagggaacacctaataaaacaactttcaaaaactcctatttatcatggatgtgccaggatcgagagaat

SEQ ID NO: 18463 - DNA, 119 bp, homo sapiens
ctaataaaaccaactttcaaaaactcctatttatcatggatgtgccaggatcgagagaatcaaacacaactgcctgtaagagaggcccttcattctgcctcatctgagctaaaatcctg

SEQ ID NO: 18464 - DNA, 119 bp, homo sapiens
caaacacaaactgcctgtaagagaggcccttcattctgcctcatctgagctaaaatcctgacttgggatccagaagcatgccactcttctcggtttgcaaagacagaagagtgagaggt

SEQ ID NO: 18465 - DNA, 119 bp, homo sapiens
acttgggatgccagaagcatgccactcttctcggtttgcaaagacagaagagtgagaggtgacctcgcctgtttagaaggaagcgtctttaagctgtgggtgccctcaccacgtgggcc

SEQ ID NO: 18466 - DNA, 119 bp, homo sapiens
gacctcgccgtgtttagaaggaagcgtctttaagctgtgggtgccctcaccacgtgggcctgtgctatgtctcagctgctggcttttaagagcaccaaagaggcagggagggcaagagg

SEQ ID NO: 18467 - DNA, 119 bp, homo sapiens
tgtgctatgttctcagctgctggcttttaagagcaccaaagaggcagggagggcaagaggaagagaagttcatttgctctgtccctgcctggccttcccaacccaggaaagagaaggat

SEQ ID NO: 18468 - DNA, 119 bp, homo sapiens
aagagaagtgtcatttgctctgtccctgcctggccttcccaacccaggaaagagaaggatttgaaagcacactaagaaagaggcctgagcaaacactggcacaatcaagcaggtggaag

SEQ ID NO: 18469 - DNA, 119 bp, homo sapiens
ttgaaagcaacactaagaaagaggcctgagcaaacactggcacaatcaagcaggtggaagaaatggttggtcttggcattttaataaacgttcaaagaaacaaaatttacttgtagggg

SEQ ID NO: 18470 - DNA, 119 bp, homo sapiens
aaatggttgggtcttggcattttaataaacgttcaaagaaacaaaatttacttgtaggggacgtgacaagaacagaacccaaagactgcctgccttctcggcagaccctagggagctgt

SEQ ID NO: 18471 - DNA, 119 bp, homo sapiens
acgtgacaaagaacagaacccaaagactgcctgccttctcggcagaccctagggagctgtggtgatgtgcagctgccacagcggctatcttccatggaaataacgtacgtcatcaacac

SEQ ID NO: 18472 - DNA, 119 bp, homo sapiens
ggtgatgtgacagctgccacagcggctatcttccatggaaataacgtacgtcatcaacacaatatacaaaccccttccactcacctgacccacccacctccctcctacatgccctaccc

SEQ ID NO: 18473 - DNA, 119 bp, homo sapiens
aatatacaacaccccttccactcacctgacccacccacctccctcctacatgccctaccccagcccctcgcaccctccaccttgctccaggctcccaccacccactcaccccaaataac

SEQ ID NO: 18474 - DNA, 119 bp, homo sapiens
cagcccctctgcaccctccaccttgctccaggctcccaccacccactcaccccaaataacctgcgtccctttgttcatttccctgacgtcccagcttgtctgtccccttgtcataagat

SEQ ID NO: 18475 - DNA, 119 bp, homo sapiens
ctgcgtcccttttgttcatttccctgacgtcccagcttgtctgtccccttgtcataagatgcagcactaacacgctctcaacactatgatagagcagactcttttaccttagtggcctg

SEQ ID NO: 18476 - DNA, 119 bp, homo sapiens
gcagcactacacacgctctcaacactatgatagagcagactcttttaccttagtggcctgtctgattgctgcatgtaaatggggggaggggagtcaaacaaatcaaggctatgcataaa

SEQ ID NO: 18477 - DNA, 119 bp, homo sapiens
tctgattgcatgcatgtaaatggggggaggggagtcaaacaaatcaaggctatgcataaacagaaaacaagcaatattcgtaaagctaggcaagcgagcgtaacattggagaaacataa

SEQ ID NO: 18478 - DNA, 119 bp, homo sapiens
cagaaaacaaagcaatattcgtaaagctaggcaagcgagcgtaacattggagaaacataaggcttgaggttattgattctttagatcacaaccgtttggattcgctttccttcttaaat

SEQ ID NO: 18479 - DNA, 119 bp, homo sapiens
ggcttgaggcttattgattctttagatcacaaccgtttggattcgctttccttcttaaatatcggtgtacattttggcttcaaaacaatctcttcttgcttctgcccctctctttgagg

SEQ ID NO: 18480 - DNA, 119 bp, homo sapiens
atcggtgtaccattttggcttcaaaacaatctcttcttgcttctgcccctctctttgaggaaggcttgctaactcagagatgtgatattagaacggccgcctgggggcgccacgatgcg

SEQ ID NO: 18481 - DNA, 119 bp, homo sapiens
aaggcttgcttaactcagagatgtgatattagaacggccgcctgggggcgccacgatgcgcttgctggcgagcgaaccccctcatccacttgggtgcctacagttggaaataaattccc

SEQ ID NO: 18482 - DNA, 119 bp, homo sapiens
cccccttctcttatcttttgatgagcctgtcccactcacctgacaggctaaatcccgactgatgaagatcctcacaggtgggttcggccgagtaggagagccccgagcagagcctgcgg

SEQ ID NO: 18483 - DNA, 119 bp, homo sapiens
gatgaagattcctcacaggtgggttcggccgagtaggagagccccgagcagagcctgcgggggtgccactttgggggtggtggtcaggtcaaacacaggcccatcgtacatgccccttg

SEQ ID NO: 18484 - DNA, 119 bp, homo sapiens
gggtgccacctttgggggtggtggtcaggtcaaacacaggcccatcgtacatgccccttgggacggcatcaggtctgccatctgcagccagagaagagcatgtcaccattcattcattc

SEQ ID NO: 18485 - DNA, 119 bp, homo sapiens
gcaccacctcagagctccaatgctttttaccttcctccgtgctttaatgcgcttgtagacatagtcggaaacgggctgcagggtatgaagcggccagccccctgggtcacgtgcaggtt

SEQ ID NO: 18486 - DNA, 119 bp, homo sapiens
atagtcggagaacgggctgcagggtatgaagcggccagccccctgggtcacgtgcaggttgccatcttcagcatgatcttgccctggcagatgacaaccagaggagccccgcgcagctc

SEQ ID NO: 18487 - DNA, 119 bp, homo sapiens
gccatcttccagcatgatcttgccctggcagatgacaaccagaggagccccgcgcagctccatcccttcaagatgttgtactctgccgcctagaggcaggggtgagaagcaaagccaca

SEQ ID NO: 18488 - DNA, 119 bp, homo sapiens
ccattctactccactcccaccagagcgggccttacagactggtggttcttggcagagacgatcttcacacatctggatcccagatgacgaggtcgctgtcagaacccacagatattctt

SEQ ID NO: 18489 - DNA, 119 bp, homo sapiens
atcttcacagcatctggatcccagatgacgaggtcgctgtcagaacccacagatattcttcccttgcgggatacaggttgaagatcttggcagcgtttgtgcttgtcacagccacgaac

SEQ ID NO: 18490 - DNA, 119 bp, homo sapiens
cccttgcggggatacaggttgaagatcttggcagcgtttgtgcttgtcacagccacgaactggttttcgccattttccctgtggcctattgaaatataagaaattatatctatatctat

SEQ ID NO: 18491 - DNA, 119 bp, homo sapiens
ccatggatgttttggctctggccaccctcccatgacctccatgccttaccacagccttgtcccagatgaagacatccgctcctccacaccattggtgccctcaggaatggctgtgaagt

SEQ ID NO: 18492 - DNA, 119 bp, homo sapiens
cccagatgacagacatccgctcctccacaccattggtgccctcaggaatggctgtgaagttgtccttccaattgctttctgggcagtgctgaaggtgcagtgggcactcccagatagct

SEQ ID NO: 18493 - DNA, 119 bp, homo sapiens
tgtccttcccaattgctttctgggcagtgctgaaggtgcagtgggcactcccagatagctgcagatcccgctggcaaaggagaaaagctccacatgaacaggggagatggctggaggca

SEQ ID NO: 18494 - DNA, 119 bp, homo sapiens
tgttttcacaaaacgcctgctgctgggcattcctgcaccaacctggccagcaaggagttgatgtagtccgagtagttgggtcagggctcaggggtggggatgtcacaaatgcagccgcc

SEQ ID NO: 18495 - DNA, 119 bp, homo sapiens
atgtagtccggagtagttgggtcagggctcaggggtggggatgtcacaaatgcagccgccttggcccagtcttgctccaataatgggttccatctatgccgaggctggcagtgatgggc

SEQ ID NO: 18496 - DNA, 119 bp, homo sapiens
ttggcccagttcttgctccaataatgggttccatctatgccgaggctggcagtgatgggctcaccaaagctacatttcctagaaggggcaggaaacagacaaggggttagcataaagta

SEQ ID NO: 18497 - DNA, 119 bp, homo sapiens
agctaagagaggagggaggacggcatgtccgggctcacctttgtccttgatgaggttctgcacttcctgttgacgctgtcattccagtgggtgatgtccacatgcagggcatagtcaca

SEQ ID NO: 18498 - DNA, 119 bp, homo sapiens
cacttcctgcttgacgctgtcattccagtgggtgatgtccacatgcagggcatagtcacagcaactcttccatcagcccactctctccatttctcataggcctcagtcaggctggactc

SEQ ID NO: 18499 - DNA, 119 bp, homo sapiens
gcaactcttcccatcagcccactctctccatttctcataggcctcagtcaggctggactcaggctcaggaccacatggtcaactgaatgacagagaccccagatgagtcactctcagac

SEQ ID NO: 18500 - DNA, 119 bp, homo sapiens
caggagtgtgtaaaatatgaagacttactgatcatggtggtgccacctgctaaggccgcctttgtccctggaagaagtcatctactgtggtcattcccttatatggcatctggaagtga

SEQ ID NO: 18501 - DNA, 119 bp, homo sapiens
tttgtcccttggaagaagtcatctactgtggtcattcccttatatggcatctggaagtgagtatggacacgatgcctccagggatcaccatcttcccattggcttcaatggtcttcact

SEQ ID NO: 18502 - DNA, 119 bp, homo sapiens
gtatggacatcgatgcctccagggatcaccatcttcccattggcttcaatggtcttcactcctccaggacaatcagattgtctccaatttgtctggtgaaacaaacaaacaaaaaaatg

SEQ ID NO: 18503 - DNA, 119 bp, homo sapiens
gaccccgcccgcagcgcagcggacagggagcgagcgaggagggagggagcagcggcgcccggactcacctgatccgcgggatgttcttcttgccttggtaggacatggtggcggtggtg

SEQ ID NO: 18504 - DNA, 119 bp, homo sapiens
ggactcaccgtgatccgcgggatgttcttcttgccttggtaggacatggtggcggtggtggctgcagcgctggctccctccctccttcttctgctccggctcgcccgcgccttcctcag

SEQ ID NO: 18505 - DNA, 119 bp, homo sapiens
gctgcagcggctggctccctccctccttcttctgctccggctcgcccgcgccttcctcagcgcacagcgcccgagatcaggtggagtgaatggtgcgctggccgcgccgccgcctccgc

SEQ ID NO: 18506 - DNA, 119 bp, homo sapiens
ccgtgcaaagtgagctggagaaagttgtgcccgggccatggcggccagggctggagaaaggaacgaaggaaggagggaagtgacccggggcccccttaccttgtccttggggccgaggt

SEQ ID NO: 18507 - DNA, 119 bp, homo sapiens
gaacgaaggcaaggagggaagtgacccggggcccccttaccttgtccttggggccgaggttctgcaacactctttgccggtggcgctccggatctctaccccggcgggggcgggggagg

SEQ ID NO: 18508 - DNA, 119 bp, homo sapiens
gggggaggcgggcgcgggctccctgctctcttcccggccttggcccctgcgcggggtgtccccctcgatccgggccgactccccgatcctcggtcgctgccctggccgctccgaggagt

SEQ ID NO: 18509 - DNA, 119 bp, homo sapiens
cccctcgatcccgggccgactccccgatcctcggtcgctgccctggccgctccgaggagtcttcgcgcccgctgccccacgctgagggcatcgaaatccagcgtcttgctctcgaaggc

SEQ ID NO: 18510 - DNA, 119 bp, homo sapiens
cttcgcgccccgctgccccacgctgagggcatcgaaatccagcgtcttgctctcgaaggcgccctccacttgcagaacatgccgccgtatttctgccgcgggacctggtccgtggtgcc

SEQ ID NO: 18511 - DNA, 119 bp, homo sapiens
gccctccacgttgcagaacatgccgccgtatttctgccgcgggacctggtccgtggtgcccggcctggcaggtacacgggcagatcgtcttcgtgggagctgtcccagcccctccggcc

SEQ ID NO: 18512 - DNA, 119 bp, homo sapiens
cggcctggccaggtacacgggcagatcgtcttcgtgggagctgtcccagcccctccggcccgaggccatgttcaagcacgaaagcggcccgcgggtttttcttccccagaggcggaaag

SEQ ID NO: 18513 - DNA, 119 bp, homo sapiens
cgaggccatggttcaagcacgaaagcggcccgcgggtttttcttccccagaggcggaaagggcagccgcggcagcgtgcgccgagccacagtgactgtggcgggaggaggcgcctgagc

SEQ ID NO: 18514 - DNA, 119 bp, homo sapiens
ggcagccgccggcagcgtgcgccgagccacagtgactgtggcgggaggaggcgcctgagccttcgcgccgaggcggcagtgctgctccgattcctgcttgtccctagcgagccagcgag

SEQ ID NO: 18515 - DNA, 119 bp, homo sapiens
cttcgcgccagaggcggcagtgctgctccgattcctgcttgtccctagcgagccagcgagccacacagcagctagcgcgcggagcaggggcccagagtagcgccgcgcttggctcactc

SEQ ID NO: 18516 - DNA, 119 bp, homo sapiens
ggcacaaatcatatcaatatggtttactgaatgaatggctagacctatcaggaaaacagcctactttttccccctacaatataattaaaagtttgtaattctcattccttaagtggtac

SEQ ID NO: 18517 - DNA, 119 bp, homo sapiens
ctacttttttccccctacaatataattaaaagtttgtaattctcattccttaagtggtactttgcaagggtccattaacagacaaaataacctcggaagccctggagcacctgtcttca

SEQ ID NO: 18518 - DNA, 119 bp, homo sapiens
tttgcaaggtgtccattaacagacaaaataacctcggaagccctggagcacctgtcttcaagataagacgcagacacaggcggtggaaatgtggaaatacgcattccccagagcagatg

SEQ ID NO: 18519 - DNA, 119 bp, homo sapiens
tttcagttcctgaatttccatcgccttttgtgcaggcaagcggaggaaagttttcaaaagaatctcggcgactaggagggaagggaagccaatagcgaagggaaaggtacattttcacg

SEQ ID NO: 18520 - DNA, 119 bp, homo sapiens
aatctcggctgactaggagggaagggaagccaatagcgaagggaaaggtacattttcacggtaagttagggcatcaccaaaggagaacatggttgtgcccacccagagtgagaagcata

SEQ ID NO: 18521 - DNA, 119 bp, homo sapiens
gtaagttagaggcatcaccaaaggagaacatggttgtgcccacccagagtgagaagcatagagcggagtgctgaaagaacaccctctggagccacagttctcaggctggctcctggctt

SEQ ID NO: 18522 - DNA, 119 bp, homo sapiens
gagcggagtggctgaaagaacaccctctggagccacagttctcaggctggctcctggcttttcaaaccctggtcagagactgaaggcaaacctgagtcacttaatttctacccgaacct

SEQ ID NO: 18523 - DNA, 119 bp, homo sapiens
atgggtcaaaacatataatgaagaatctaggagcaaagtaagctctccacaaacattggctagtattatattttctggaaatcttcaagatttgaaacaaaagagaaaacctactctta

SEQ ID NO: 18524 - DNA, 119 bp, homo sapiens
tagtattattattttctggaaatcttcaagatttgaaacaaaagagaaaacctactcttaagatgggggggtgtgtgacctttgcgtgctgaatttgggaggatactttaagcctggca

SEQ ID NO: 18525 - DNA, 119 bp, homo sapiens
agatgggggtggtgtgtgacctttgcgtgctgaatttgggaggatactttaagcctggcagagacagggaataacacccccagcagctctctgggtacttcctgtagagggagatctaa

SEQ ID NO: 18526 - DNA, 119 bp, homo sapiens
gagacagggtaataacacccccagcagctctctgggtacttcctgtagagggagatctaaaaacctcaggttttgaatgcctcgcccacaaaggcaggatacacaagggggacagaaga

SEQ ID NO: 18527 - DNA, 119 bp, homo sapiens
aaacctcagggttttgaatgcctcgcccacaaaggcaggatacacaagggggacagaagataacgagcttctgggtctccagaatgacagactagcactgagtggccaccacagtgggc

SEQ ID NO: 18528 - DNA, 119 bp, homo sapiens
taacgagctttctgggtctccagaatgacagactagcactgagtggccaccacagtgggcatcacatccaacttcaatcttgacaggttcaattcatttattcatgaacacttattaag

SEQ ID NO: 18529 - DNA, 119 bp, homo sapiens
attcatgaacacttattaagggccactgtcacagggttggtgattttcactctctgggagcttatagtcaaataattgcaacaggaagacatattgatatcctttaaaagatgcagccc

SEQ ID NO: 18530 - DNA, 119 bp, homo sapiens
cttatagtcaaaataattgcaacaggaagacatattgatatcctttaaaagatgcagcccatccgtccaagcatttgagaagtggcctctctttgcctcacattttaccaggtgcttca

SEQ ID NO: 18531 - DNA, 119 bp, homo sapiens
atccgtccacagcatttgagaagtggcctctctttgcctcacattttaccaggtgcttcaggatgttaccaggtgagaatttgcttctgtacagaacaaagaggatcagcaacagagag

SEQ ID NO: 18532 - DNA, 119 bp, homo sapiens
ggatgttacacaggtgagaatttgcttctgtacagaacaaagaggatcagcaacagagaggggagccataggggatcacaatgtgacagacaccgtttcgaaaacacataaaatcatgc

SEQ ID NO: 18533 - DNA, 119 bp, homo sapiens
gggagccatcaggggatcacaatgtgacagacaccgtttcgaaaacacataaaatcatgcaccgaatccgttctgcctgaattcaaggctgacaaatttccaccattacattttttatg

SEQ ID NO: 18534 - DNA, 119 bp, homo sapiens
accgaatcctgttctgcctgaattcaaggctgacaaatttccaccattacattttttatgttgtaactgcctgtgtatccatttaaagatgtcataataataatttcaataattattgt

SEQ ID NO: 18535 - DNA, 119 bp, homo sapiens
ttgtaactgacctgtgtatccatttaaagatgtcataataataatttcaataattattgtaaatctaggaagtattactacccaaatgtattctgaacattttggaagcacaatgttat

SEQ ID NO: 18536 - DNA, 119 bp, homo sapiens
aaatctaggaaagtattactacccaaatgtattctgaacattttggaagcacaatgttatttattgctttgcatgaaaaaataattgttagtgaaaaattaatggacctgcatgtaagt

SEQ ID NO: 18537 - DNA, 119 bp, homo sapiens
ttattgcttttgcatgaaaaaataattgttagtgaaaaattaatggacctgcatgtaagtactcaacatctcacataattaaactggtgaattatattccacacatttgcggtgtttcc

SEQ ID NO: 18538 - DNA, 119 bp, homo sapiens
actcaacatgctcacataattaaactggtgaattatattccacacatttgcggtgtttcctggggaaaaaaagtatcgtgggagttaaatctttgaaagaattgggaagaaaataaaca

SEQ ID NO: 18539 - DNA, 119 bp, homo sapiens
tggggaaaaaaaagtatcgtgggagttaaatctttgaaagaattgggaagaaaataaacacacattaaaacactgagaacgttttagaactggagaaagaaaggttcttactgattatc

SEQ ID NO: 18540 - DNA, 119 bp, homo sapiens
cacattaaagacactgagaacgttttagaactggagaaagaaaggttcttactgattatcttcagagtaagcaagaaggtggtcatggatttaaatccaggtggacagaaactaattat

SEQ ID NO: 18541 - DNA, 119 bp, homo sapiens
ttcagagtagagcaagaaggtggtcatggatttaaatccaggtggacagaaactaattattcgctctaaaaagtcagataacataaaagacagaatctatagccaataaacaacatgac

SEQ ID NO: 18542 - DNA, 119 bp, homo sapiens
tcgctctaaaaaagtcagataacataaaagacagaatctatagccaataaacaacatgacagaaaccaaaccaacacaagaaaaattacctacgtatttcttcctagcctaggactctg

SEQ ID NO: 18543 - DNA, 119 bp, homo sapiens
agaaaccaaaaccaacacaagaaaaattacctacgtatttcttcctagcctaggactctgatttcacttcattccacaagggaattagagaaaacacgattttttgttttgttctgttt

SEQ ID NO: 18544 - DNA, 119 bp, homo sapiens
atttcacttacattccacaagggaattagagaaaacacgattttttgttttgttctgttttcttggtcggtagcctaaagtcttaagaatttttgtataatttaaatagcaccacagga

SEQ ID NO: 18545 - DNA, 119 bp, homo sapiens
tcttggtcgagtagcctaaagtcttaagaatttttgtataatttaaatagcaccacaggaaaaatccctagcaactaatgaatgttatttggtctcttttcattcggatttataccaag

SEQ ID NO: 18546 - DNA, 119 bp, homo sapiens
aaaatccctgagcaactaatgaatgttatttggtctcttttcattcggatttataccaagcccaatatgtcgtgctggtcctggctaaccactaaaggttaaaaaaaaaaaaaaagata

SEQ ID NO: 18547 - DNA, 119 bp, homo sapiens
cccaatatgatcgtgctggtcctggctaaccactaaaggttaaaaaaaaaaaaaaagataaaagataaatgaatgcaggccatttaaatcattccatactttttcaagagattgagcct

SEQ ID NO: 18548 - DNA, 119 bp, homo sapiens
aaagataaaatgaatgcaggccatttaaatcattccatactttttcaagagattgagcctgacattattcagcccagggtgttccttttgttttcaaataagtaatgtagctttctcct

SEQ ID NO: 18549 - DNA, 119 bp, homo sapiens
tatttaaactttggccatcactgctgttcagggtgctgtagttgtacatcgatgaagcaccttctgtctagggttcacaagccccagacaagggcagctagtcaacccctgagacgctg

SEQ ID NO: 18550 - DNA, 119 bp, homo sapiens
cttctgtctcagggttcacaagccccagacaagggcagctagtcaacccctgagacgctggtaggaagcatgatccagttgttgaaggtggcttcagtcccagcctgagcaggaaaaga

SEQ ID NO: 18551 - DNA, 119 bp, homo sapiens
gtaggaagccatgatccagttgttgaaggtggcttcagtcccagcctgagcaggaaaagaaatccaggcttctgactggagagctgaggccccctgccctaattggactgatttcctga

SEQ ID NO: 18552 - DNA, 119 bp, homo sapiens
aatccaggctttctgactggagagctgaggccccctgccctaattggactgatttcctgattcatttatttttttaaaaaatgctttcctaggagatgcagcaaaaatcacaccagtct

SEQ ID NO: 18553 - DNA, 119 bp, homo sapiens
ttcatttattttttttaaaaaatgctttcctaggagatgcagcaaaaatcacaccagtctcctgtggctccccaaatcatctcgacagaaaagaagagagaagttggcagttttcagca

SEQ ID NO: 18554 - DNA, 119 bp, homo sapiens
cctgtggctcccccaaatcatctcgacagaaaagaagagagaagttggcagttttcagcatattaatagaaacgacaaattagtaactatgtactttaatcttcaacattcataattgc

SEQ ID NO: 18555 - DNA, 119 bp, homo sapiens
tattaatagcaaacgacaaattagtaactatgtactttaatcttcaacattcataattgcacaaagcatactggtcatttaaataatacatgtcaattaatctaatgaagaaactggca

SEQ ID NO: 18556 - DNA, 119 bp, homo sapiens
acaaagcatcactggtcatttaaataatacatgtcaattaatctaatgaagaaactggcaaagtagaatttaaaagcaatacctcgagcacgtaaagaatgtttgatattaacacttaa

SEQ ID NO: 18557 - DNA, 119 bp, homo sapiens
aagtagaatgttaaaagcaatacctcgagcacgtaaagaatgtttgatattaacacttaacatgcaaaagcagattagaacagctcttttgagcatggttatttaaaatccttaccaac

SEQ ID NO: 18558 - DNA, 119 bp, homo sapiens
catgcaaaacgcagattagaacagctcttttgagcatggttatttaaaatccttaccaacagggcaaagaagcactgtggagaaatacacataaatatatccaacctgccagatctctc

SEQ ID NO: 18559 - DNA, 119 bp, homo sapiens
agggcaaagcaagcactgtggagaaatacacataaatatatccaacctgccagatctctcaggtgagtgacaccaattctaacaggtctggctgacctggctttccacatatatacagt

SEQ ID NO: 18560 - DNA, 119 bp, homo sapiens
aggtgagtgcacaccaattctaacaggtctggctgacctggctttccacatatatacagtggtttctaaactccaaagttgtctgacgatgggaacgcagaatcggaacaaggagggaa

SEQ ID NO: 18561 - DNA, 119 bp, homo sapiens
ggtttctaatactccaaagttgtctgacgatgggaacgcagaatcggaacaaggagggaagaccatttatttcaaaatagaatccggcagggaagtctcaactcctgacaagtcacctt

SEQ ID NO: 18562 - DNA, 119 bp, homo sapiens
gaccatttactttcaaaatagaatccggcagggaagtctcaactcctgacaagtcacctttaaaacagctaaccagaactttcttacagagaaaaatcttttttccttaaaaatgtata

SEQ ID NO: 18563 - DNA, 119 bp, homo sapiens
taaaacagcataaccagaactttcttacagagaaaaatcttttttccttaaaaatgtatatgtggcaaaatggctgaaaatcttgtccatgctaggggaaagctgagtgtggaaaaatg

SEQ ID NO: 18564 - DNA, 119 bp, homo sapiens
tgtggcaaaaatggctgaaaatcttgtccatgctaggggaaagctgagtgtggaaaaatgtgcattttttatctatgctgtaaagaaaatacaaagccagagcattttggcattagcaa

SEQ ID NO: 18565 - DNA, 119 bp, homo sapiens
tgcatttttctatctatgctgtaaagaaaatacaaagccagagcattttggcattagcaaaggctgaacaagttctcaggcaataaatttatggggaaacatgacaggctcctcattaa

SEQ ID NO: 18566 - DNA, 119 bp, homo sapiens
aggctgaactaagttctcaggcaataaatttatggggaaacatgacaggctcctcattaaagctatgtgacgttggctgaattttatacaagattcttgaatcttgtggaaaattgggc

SEQ ID NO: 18567 - DNA, 119 bp, homo sapiens
agctatgtgtacgttggctgaattttatacaagattcttgaatcttgtggaaaattgggcatggcttgaatctgaacaatgtccctggtttgtttgatttctaaagcatcggaaaatgt

SEQ ID NO: 18568 - DNA, 119 bp, homo sapiens
atggcttgacatctgaacaatgtccctggtttgtttgatttctaaagcatcggaaaatgttgcactttgaaatcaagtagagaagaataaacacactctaaaacagaactgggctgaat

SEQ ID NO: 18569 - DNA, 119 bp, homo sapiens
tgcactttggaaatcaagtagagaagaataaacacactctaaaacagaactgggctgaatctgaaagtttttttccatatgtctctatgagatatttattacgtttatttctcatacaa

SEQ ID NO: 18570 - DNA, 119 bp, homo sapiens
tttttttttttttttttttggtggcgagaaaatagtactgttaaggcaaatcttaccccgtagcagttacagcaggacaggcaattttcagtgggcttttcagaagctggttgccatga

SEQ ID NO: 18571 - DNA, 119 bp, homo sapiens
tagcagttaccagcaggacaggcaattttcagtgggcttttcagaagctggttgccatgacaaagagcaaatttattcctcagtcccttatcacagctacgatcacagaccataaaaat

SEQ ID NO: 18572 - DNA, 119 bp, homo sapiens
caaagagcacaatttattcctcagtcccttatcacagctacgatcacagaccataaaaattaacaccgccttttccatctgatttcagagttcctcatccttacctgaggccttttgtt

SEQ ID NO: 18573 - DNA, 119 bp, homo sapiens
taacaccgctcttttccatctgatttcagagttcctcatccttacctgaggccttttgttcccccaattaatggaatgaatgtcagtcatttagcaattcaattaatgctgattcaaaa

SEQ ID NO: 18574 - DNA, 119 bp, homo sapiens
cccccaattaaatggaatgaatgtcagtcatttagcaattcaattaatgctgattcaaaattccggccaaaccagaatctataatcacaacttcctaatcacagttcagtcatgagaat

SEQ ID NO: 18575 - DNA, 119 bp, homo sapiens
ttccggccaaaaccagaatctataatcacaacttcctaatcacagttcagtcatgagaatgaaaagtaacaggaaattgcactaattactcaattagactaatactgtatttctaagca

SEQ ID NO: 18576 - DNA, 119 bp, homo sapiens
gaaaagtaagcaggaaattgcactaattactcaattagactaatactgtatttctaagcaagggcttacaggttgtcagccctgacaaaggacttcggagtcctcttcaccttgtgtgt

SEQ ID NO: 18577 - DNA, 119 bp, homo sapiens
agggcttacgaggttgtcagccctgacaaaggacttcggagtcctcttcaccttgtgtgtccacagttgccaaccaaagctggtattttcaactggccataatttctgtccatctaaca

SEQ ID NO: 18578 - DNA, 119 bp, homo sapiens
ccacagttgtccaaccaaagctggtattttcaactggccataatttctgtccatctaacatggatggacgaagctgggcaatgggcgtcataactgatatactgaccacaagtgagggc

SEQ ID NO: 18579 - DNA, 119 bp, homo sapiens
tggatggactgaagctgggcaatgggcgtcataactgatatactgaccacaagtgagggccgctttggtggcttcaaggggcacaggccggtgtggtggccagggctttcccatgagag

SEQ ID NO: 18580 - DNA, 119 bp, homo sapiens
cgctttggtgggcttcaaggggcacaggccggtgtggtggccagggctttcccatgagaggccctcctcccggtgtgaagacacccacatgcatacctttctggctccaggaaatatct

SEQ ID NO: 18581 - DNA, 119 bp, homo sapiens
gccctcctccccggtgtgaagacacccacatgcatacctttctggctccaggaaatatctagtaaggggagcattcagtgagtgtacagctactttcctcatcttcaatttcagtgagt

SEQ ID NO: 18582 - DNA, 119 bp, homo sapiens
agtaagggggagcattcagtgagtgtacagctactttcctcatcttcaatttcagtgagtacacaggcatggcttccatactcaaaacagggcctgcaatatgctgggcagagagctcc

SEQ ID NO: 18583 - DNA, 119 bp, homo sapiens
acacaggcactggcttccatactcaaaacagggcctgcaatatgctgggcagagagctccttgctgagtagcctgctggggtggggtctgcaggcggctggaacctaaggctcatctgc

SEQ ID NO: 18584 - DNA, 119 bp, homo sapiens
ttgctgagtgagcctgctggggtggggtctgcaggcggctggaacctaaggctcatctgcacccttggaacagcttctcacaccaagactgcccggagaagccttcatgaagtcaagaa

SEQ ID NO: 18585 - DNA, 119 bp, homo sapiens
acccttggaaacagcttctcacaccaagactgcccggagaagccttcatgaagtcaagaacagtgaatgaaaggtggcagggacaggcacacgggcagatgtgactgaagtatttacaa

SEQ ID NO: 18586 - DNA, 119 bp, homo sapiens
cagtgaatgaaaaggtggcagggacaggcacacgggcagatgtgactgaagtatttacaaaacaacacaagagacccaacaagctggaccttattaaaaaaaaacaaaacaaaaaaact

SEQ ID NO: 18587 - DNA, 119 bp, homo sapiens
aacaacacagagagacccaacaagctggaccttattaaaaaaaaacaaaacaaaaaaactaaaaacgtaatacttttttcctatacagtttcacaagacttaaatatgctgtaaacaac

SEQ ID NO: 18588 - DNA, 119 bp, homo sapiens
aaaaacgtagatacttttttcctatacagtttcacaagacttaaatatgctgtaaacaacagggaggagctagagcctgtcacacctctggtttttatggtcacctgtcaaaatccttc

SEQ ID NO: 18589 - DNA, 119 bp, homo sapiens
agggaggagactagagcctgtcacacctctggtttttatggtcacctgtcaaaatccttcctgaggtggctcctgaggggagaggaactggagacagggacagggaagaggcctatccc

SEQ ID NO: 18590 - DNA, 119 bp, homo sapiens
ctgaggtggcctcctgaggggagaggaactggagacagggacagggaagaggcctatcccatacatatgcatggtctttcctctgcagaagtttctggaaatgacccaacttgggaaat

SEQ ID NO: 18591 - DNA, 119 bp, homo sapiens
atacatatgtcatggtctttcctctgcagaagtttctggaaatgacccaacttgggaaatgctcaggggtctgaaaagaggaagaacatttatttgcctaagtgagacaaagtctttac

SEQ ID NO: 18592 - DNA, 119 bp, homo sapiens
gctcaggggttctgaaaagaggaagaacatttatttgcctaagtgagacaaagtctttacttccagggttgccttgcaggtgaccactgctgagggagcgggggtttgagtggctggcg

SEQ ID NO: 18593 - DNA, 119 bp, homo sapiens
ttccagggtttgccttgcaggtgaccactgctgagggagcgggggtttgagtggctggcggggccgccactggcagattctgagcgcttcgggcaccaggcaccttggactctcttccg

SEQ ID NO: 18594 - DNA, 119 bp, homo sapiens
gggccgccacctggcagattctgagcgcttcgggcaccaggcaccttggactctcttccggaggagttacttggttcagtcggcctgaagggagcaagaaagaaggaacagagctgcaa

SEQ ID NO: 18595 - DNA, 119 bp, homo sapiens
aaaagatcttactaggatgatctgcaggcccttgctcctcttccagataatattctatcttttttaagtttctggggtaaatctccatttattctcagctggtaggggtggccctttgg

SEQ ID NO: 18596 - DNA, 119 bp, homo sapiens
ggctggatcgtttccgggcagacccaggaggaagggcctgctggcaagatgctggcagggaaccagtaacagtccttccgggaatttctgagctaagacttttagacctaggtttggaa

SEQ ID NO: 18597 - DNA, 119 bp, homo sapiens
tctgttcttgagagtgaggcactttaaagccttctctctcttacctccaacaatgtggcactgctggtagaatctctatcacgcacatctagcagcaggaaggggcagtcaggataagg

SEQ ID NO: 18598 - DNA, 119 bp, homo sapiens
ctgctggtaagaatctctatcacgcacatctagcagcaggaaggggcagtcaggataaggtttgtctttgtatggggctctgctttcttcactggccctttgtctagatccagttcccc

SEQ ID NO: 18599 - DNA, 119 bp, homo sapiens
tttgtctttggtatggggctctgctttcttcactggccctttgtctagatccagttccccaacaccactatgacactgcaagtgaaaaagtaggtcagcagaaactagtcagaggttgg

SEQ ID NO: 18600 - DNA, 119 bp, homo sapiens
ttaatataaaggcaaaatgcagtgaaaatatgaatcagcttcgagtacctctgaagagttgagcggctgagtcccctgctcctgcgttgtttatgaactgctcagggctcggcgactgc

SEQ ID NO: 18601 - DNA, 119 bp, homo sapiens
gagcggctggagtcccctgctcctgcgttgtttatgaactgctcagggctcggcgactgctcacctggattcctttcccattggtcctggcagtggtttcagcatcagggtctgaagct

SEQ ID NO: 18602 - DNA, 119 bp, homo sapiens
tcacctggatttcctttcccattggtcctggcagtggtttcagcatcagggtctgaagctgcagaatcatgtctaatatttacaaatgaagaaataattagattgaacctcaggatttg

SEQ ID NO: 18603 - DNA, 119 bp, homo sapiens
ctactaacaaagtgtctacacttcatttctccattaattacaaacatttcagggtaattacacttaacatttattttgtatcagctgaccctcaccacaatgcagggaggtaggccatc

SEQ ID NO: 18604 - DNA, 119 bp, homo sapiens
cacttaacactttattttgtatcagctgaccctcaccacaatgcagggaggtaggccatcatgccctcttttgttttccccctaaaggagaaggctgagaaacaagttttttgcaatta

SEQ ID NO: 18605 - DNA, 119 bp, homo sapiens
atgccctctatttgttttccccctaaaggagaaggctgagaaacaagttttttgcaattatacaaatattggtgaaattcagaccaaatctgagaggactactgatgagttcttttcac

SEQ ID NO: 18606 - DNA, 119 bp, homo sapiens
tacaaatatttggtgaaattcagaccaaatctgagaggactactgatgagttcttttcactatagacatcattctatccaagaatggggaaaaaaggagaatggaggatttcttccttg

SEQ ID NO: 18607 - DNA, 119 bp, homo sapiens
tatagacattcattctatccaagaatggggaaaaaaggagaatggaggatttcttccttgctttaattgacaaatgagatagcaggatggctgacacaaaaatacccctaaaaatggtt

SEQ ID NO: 18608 - DNA, 119 bp, homo sapiens
ctttaattggacaaatgagatagcaggatggctgacacaaaaatacccctaaaaatggtttgagaaagttgaaaagtagcatttttatcccactgtgtaaactgcttacatcttaacta

SEQ ID NO: 18609 - DNA, 119 bp, homo sapiens
tgagaaagtatgaaaagtagcatttttatcccactgtgtaaactgcttacatcttaactatgcagcctacttactgtatctaattgcatctgaagatagtttctgactaccttttaaaa

SEQ ID NO: 18610 - DNA, 119 bp, homo sapiens
tgcagcctatcttactgtatctaattgcatctgaagatagtttctgactaccttttaaaaagattggaatgaatccatttcataattcacttatttataaacatggctttgtttcatac

SEQ ID NO: 18611 - DNA, 119 bp, homo sapiens
agattggaaatgaatccatttcataattcacttatttataaacatggctttgtttcatacaaaagaagctaaaagactatccaagaaccaattttttttaaaaaaaattgaaattacac

SEQ ID NO: 18612 - DNA, 119 bp, homo sapiens
attactgccagatacattttcccagataagactttttgatcaaaaagaaaaaaaaaagtcagtggctcccattgcttcctaactaaagctgaaactccttgctctagcactggacacca

SEQ ID NO: 18613 - DNA, 119 bp, homo sapiens
agtggctccccattgcttcctaactaaagctgaaactccttgctctagcactggacaccaactcactactcttaatgttgccttaattacttaacttgacaaactcttagtcttgcatt

SEQ ID NO: 18614 - DNA, 119 bp, homo sapiens
actcactacctcttaatgttgccttaattacttaacttgacaaactcttagtcttgcattctctaacgttcaccttgccacatactcgtaagagctcactcagcaggaagtgacctttc

SEQ ID NO: 18615 - DNA, 119 bp, homo sapiens
ctctaacgtatcaccttgccacatactcgtaagagctcactcagcaggaagtgacctttccctcctctggcctctatagcactcggcttacaactcacaaggcatttatcactgtattg

SEQ ID NO: 18616 - DNA, 119 bp, homo sapiens
cctcctctgagcctctatagcactcggcttacaactcacaaggcatttatcactgtattgtcttacctacttactagacagaaagccaaggactatttatgggcacgtacacacacaca

SEQ ID NO: 18617 - DNA, 119 bp, homo sapiens
ataaataaataaataaataggaaaaatacacatttgctgaatgaaatttactatggagatctactaactaaaaatccttataatgagttattttataatgcaaatacttcccaatttgg

SEQ ID NO: 18618 - DNA, 119 bp, homo sapiens
ctactaactgaaaaatccttataatgagttattttataatgcaaatacttcccaatttggtctgagttttgcacacctgattttctttaaactatgtacaacttgacttatatacagta

SEQ ID NO: 18619 - DNA, 119 bp, homo sapiens
tctgagtttctgcacacctgattttctttaaactatgtacaacttgacttatatacagtatatgttatggctacatatatgactcatattgcttcacgacttaagcaacctataaatgt

SEQ ID NO: 18620 - DNA, 119 bp, homo sapiens
tatgttatgtgctacatatatgactcatattgcttcacgacttaagcaacctataaatgtataaggtagatttagcttctactttgtttacttacaactaaagttgtgataaaagatat

SEQ ID NO: 18621 - DNA, 119 bp, homo sapiens
ataaggtagcatttagcttctactttgtttacttacaactaaagttgtgataaaagatatataacaaaatttacaattagaatcaagaggaagaaacaacccgactatagcaacagtgc

SEQ ID NO: 18622 - DNA, 119 bp, homo sapiens
ataacaaaactttacaattagaatcaagaggaagaaacaacccgactatagcaacagtgctgtgcaaaccagagtgcaactgattcagtgaatgagtcattcattagattttttccatt

SEQ ID NO: 18623 - DNA, 119 bp, homo sapiens
tgtgcaaacacagagtgcaactgattcagtgaatgagtcattcattagattttttccattgttttcctaaatttaataacattatttatactgagccaataagaaaagcaagtgatttt

SEQ ID NO: 18624 - DNA, 119 bp, homo sapiens
gttttcctataatttaataacattatttatactgagccaataagaaaagcaagtgattttgtgcagcagaatctaaagtagatgagatttataaggcacgaactcagttgctaagagac

SEQ ID NO: 18625 - DNA, 119 bp, homo sapiens
gtgcagcagtaatctaaagtagatgagatttataaggcacgaactcagttgctaagagacaactccatgctttatttttcttcaatatttccctcctctatggagaagttctcttggct

SEQ ID NO: 18626 - DNA, 119 bp, homo sapiens
aactccatggctttatttttcttcaatatttccctcctctatggagaagttctcttggcttggaagagcgaaagcatgaaaagaggcacagtggtcctttgttaacctcaataagtgat

SEQ ID NO: 18627 - DNA, 119 bp, homo sapiens
tggaagagcagaaagcatgaaaagaggcacagtggtcctttgttaacctcaataagtgatatgtgtgtaagtgctttctggtttataaaagcctttcacatatatttcttcctttgacg

SEQ ID NO: 18628 - DNA, 119 bp, homo sapiens
atgtgtgtatagtgctttctggtttataaaagcctttcacatatatttcttcctttgacggaagaaacaaattaaacaacaaataaaaatgaagagtacctagtctataatgagtttga

SEQ ID NO: 18629 - DNA, 119 bp, homo sapiens
gaagaaacagaattaaacaacaaataaaaatgaagagtacctagtctataatgagtttgatgcttacagcaaggctattagcaaatattcaggaaaagtaaagcctaaagaagaaaaga

SEQ ID NO: 18630 - DNA, 119 bp, homo sapiens
tgcttacagtcaaggctattagcaaatattcaggaaaagtaaagcctaaagaagaaaagagggaatgaaagtttgtctagagataataaaaggaaggtgaatttttaaaaagacaaaaa

SEQ ID NO: 18631 - DNA, 119 bp, homo sapiens
gggaatgaatagtttgtctagagataataaaaggaaggtgaatttttaaaaagacaaaaataaggctagaaagactgagtggagaaagcctacagaatttcagaaagctaaagaaattg

SEQ ID NO: 18632 - DNA, 119 bp, homo sapiens
taaggctagaaaagactgagtggagaaagcctacagaatttcagaaagctaaagaaattggaaattagatgaatatagatagaaatgggaggacaatgcagccaatgaaagactgtggg

SEQ ID NO: 18633 - DNA, 119 bp, homo sapiens
gaaattagattgaatatagatagaaatgggaggacaatgcagccaatgaaagactgtggggactaataagggagagccctgtggtttggaaagtgtcccttaatcagcctgcagtgctg

SEQ ID NO: 18634 - DNA, 119 bp, homo sapiens
gactaataaagggagagccctgtggtttggaaagtgtcccttaatcagcctgcagtgctgcaaaacagaacccagagagggtgcttgagaatatacaagaaccctgcggtggtgactga

SEQ ID NO: 18635 - DNA, 119 bp, homo sapiens
caaaacagaaacccagagagggtgcttgagaatatacaagaaccctgcggtggtgactgaacaaaacgcgccagggatttcatcagaagcataatccattcatggcacagtctggcagt

SEQ ID NO: 18636 - DNA, 119 bp, homo sapiens
acaaaacgcagccagggatttcatcagaagcataatccattcatggcacagtctggcagtgctggggagtggtaagatacacacaggcacctatggaacaaaagaaatatttgaagttc

SEQ ID NO: 18637 - DNA, 119 bp, homo sapiens
cctggccctcacctcagggttcccaatgtgcctccggagggacatattttctccaaccgaccacgttcgggttctagcctcacgggttgcctctaaccctagcttcctacccccacaac

SEQ ID NO: 18638 - DNA, 119 bp, homo sapiens
ccacgttcggggttctagcctcacgggttgcctctaaccctagcttcctacccccacaaccttgttcagcgcctccctataccctcttctccgattggcccgtcttccccggccggcca

SEQ ID NO: 18639 - DNA, 119 bp, homo sapiens
cttgttcagccgcctccctataccctcttctccgattggcccgtcttccccggccggccaatgggggcccgtttactctctcatctcagggtcgcagaagggcaagacgccgctcaatg

SEQ ID NO: 18640 - DNA, 119 bp, homo sapiens
atgggggccccgtttactctctcatctcagggtcgcagaagggcaagacgccgctcaatggttgccaaggcaacgcgggacgccggctagcgaggccttttgttctctgggctggggct

SEQ ID NO: 18641 - DNA, 119 bp, homo sapiens
aaatggtattcaaacaaagaaatacagcaactcagtttattacatgcagattcttctgcattgttgctacagttcactggtccaaaattactaaaatacttaaaaaactatacattatg

SEQ ID NO: 18642 - DNA, 119 bp, homo sapiens
ttgttgctaacagttcactggtccaaaattactaaaatacttaaaaaactatacattatgtaaacaaaaataaataagacagcatagttctttgtacatatatttagtacaggttgtta

SEQ ID NO: 18643 - DNA, 119 bp, homo sapiens
taaacaaaacataaataagacagcatagttctttgtacatatatttagtacaggttgttagggattctgaatatgtacaattttacatcatggactgcatttttcacaatgcataaata

SEQ ID NO: 18644 - DNA, 119 bp, homo sapiens
ttttttttacagaaacaaaaataagatttcactaatgacactgaataccatatcatagatatgctgcaaagtccaaattcaagaagaaacatgtcaatgtaaatgtgcaaaaggctagc

SEQ ID NO: 18645 - DNA, 119 bp, homo sapiens
atgctgcaacagtccaaattcaagaagaaacatgtcaatgtaaatgtgcaaaaggctagcttactctaactattcaaactttgttcactttatgttctacagacaggtaaatcctgact

SEQ ID NO: 18646 - DNA, 119 bp, homo sapiens
ttactctaaactattcaaactttgttcactttatgttctacagacaggtaaatcctgactttaaacacaaaccttgaaaccctcctcagaacagtaagtgaaatggaacagatctttcc

SEQ ID NO: 18647 - DNA, 119 bp, homo sapiens
ttaaacacagaaccttgaaaccctcctcagaacagtaagtgaaatggaacagatctttccctccccaagaaacaaagccttgttgcaagctaatgaaaagatacattaaaacacacaca

SEQ ID NO: 18648 - DNA, 119 bp, homo sapiens
acacacacacacacacacaatgtatagtatgctttcaacagtataataaacattgaaaatttttatggggtcaaaacaatgccccattatttaaaaactggctcttttagtctaaattc

SEQ ID NO: 18649 - DNA, 119 bp, homo sapiens
ttttatgggagtcaaaacaatgccccattatttaaaaactggctcttttagtctaaattcaagatgcagtctgtcaggcttctctaagcccgacgactgaaaagcagggaagacagacg

SEQ ID NO: 18650 - DNA, 119 bp, homo sapiens
aagatgcagctctgtcaggcttctctaagcccgacgactgaaaagcagggaagacagacgcaggacttcactggcagatacaacaatctgagagagagatggagagagtgaagaaacct

SEQ ID NO: 18651 - DNA, 119 bp, homo sapiens
caggacttcgactggcagatacaacaatctgagagagagatggagagagtgaagaaaccttagatgctgagtatttatggtattcaaaatggctccttctgggctaaccaacaattttt

SEQ ID NO: 18652 - DNA, 119 bp, homo sapiens
tagatgctggagtatttatggtattcaaaatggctccttctgggctaaccaacaattttttgacaggtggtccaaatgaaacactgaagtgctacttggcagtggaggattactggggc

SEQ ID NO: 18653 - DNA, 119 bp, homo sapiens
tgacaggtgggtccaaatgaaacactgaagtgctacttggcagtggaggattactggggcaaatggcagaaccaaagatgtcttagccaaaagagtagctggagacttaattactgaag

SEQ ID NO: 18654 - DNA, 119 bp, homo sapiens
aaatggcagaaaccaaagatgtcttagccaaaagagtagctggagacttaattactgaagtcagtgatatgttggtacaggaggtggaacaggaaccttagcagttgtgtttatgagtt

SEQ ID NO: 18655 - DNA, 119 bp, homo sapiens
tcagtgatactgttggtacaggaggtggaacaggaaccttagcagttgtgtttatgagttgtggtgatgatgtactgtgggtatagaacttgcattcccaaaagagtttataaattttg

SEQ ID NO: 18656 - DNA, 119 bp, homo sapiens
gtggtgatgtatgtactgtgggtatagaacttgcattcccaaaagagtttataaattttgtagggcttctagaggatgttgtagaggttggccacttaaggaattatttgatgctagtg

SEQ ID NO: 18657 - DNA, 119 bp, homo sapiens
tagggcttcttagaggatgttgtagaggttggccacttaaggaattatttgatgctagtgtgatcttctggcagagttatctattggtgtagattgaatgccttggccactgttaagaa

SEQ ID NO: 18658 - DNA, 119 bp, homo sapiens
tgatcttctgggcagagttatctattggtgtagattgaatgccttggccactgttaagaactaagggggtccatattttggattagtagatataaggagaacatggctgccagctccaa

SEQ ID NO: 18659 - DNA, 119 bp, homo sapiens
ctaagggggctccatattttggattagtagatataaggagaacatggctgccagctccaagaccttgtgtggaacaataaaccgggttccgttaatcataatctgagtaccaggtgcca

SEQ ID NO: 18660 - DNA, 119 bp, homo sapiens
gaccttgtggtggaacaataaaccgggttccgttaatcataatctgagtaccaggtgccaaaggtgtacggtattgatgactattttttgctgaatacaaggttcactgaactgactcc

SEQ ID NO: 18661 - DNA, 119 bp, homo sapiens
aaggtgtactggtattgatgactattttttgctgaatacaaggttcactgaactgactcccgactagacagttacattggatggtgccgaagccgtgtgaatggtagtgccacctggag

SEQ ID NO: 18662 - DNA, 119 bp, homo sapiens
cgactagactagttacattggatggtgccgaagccgtgtgaatggtagtgccacctggagcagaactgtactgggggtttttactaaagcttgctgatttggcagagaagcaaaattgg

SEQ ID NO: 18663 - DNA, 119 bp, homo sapiens
cagaactgtaactgggggtttttactaaagcttgctgatttggcagagaagcaaaattggacgtattagtattttacctggacttgttgaaagggacgacaattcagtttgaggtttat

SEQ ID NO: 18664 - DNA, 119 bp, homo sapiens
acgtattagttattttacctggacttgttgaaagggacgacaattcagtttgaggtttatttgtgtttaatttgttggcactgtagttgaaatccctggtgaatggaactggagtgaag

SEQ ID NO: 18665 - DNA, 119 bp, homo sapiens
ttgtgtttacatttgttggcactgtagttgaaatccctggtgaatggaactggagtgaagtccgagatttcttttagaaatagatacagaacgtgtggctcctggtactgctgccgaat

SEQ ID NO: 18666 - DNA, 119 bp, homo sapiens
tccgagattgtcttttagaaatagatacagaacgtgtggctcctggtactgctgccgaatgtggaactggtttattattttaggggatgtagtcgcaggtgtaggtaaggcaaccgtaa

SEQ ID NO: 18667 - DNA, 119 bp, homo sapiens
gtggaactgtgtttattattttaggggatgtagtcgcaggtgtaggtaaggcaaccgtaacaggaatttcaaagctgatgttaaacatttaggagacactactggttgtgtagttgaaa

SEQ ID NO: 18668 - DNA, 119 bp, homo sapiens
caggaatttgcaaagctgatgttaaacatttaggagacactactggttgtgtagttgaaatcagaacagtgatgcaaggtgtcctgttttcacagttgatatagccacagtgtttccga

SEQ ID NO: 18669 - DNA, 119 bp, homo sapiens
tcagaacagatgatgcaaggtgtcctgttttcacagttgatatagccacagtgtttccgagacttgatggcaaagtctatttgacaaaataggcataattcttgaagaggtatcatttc

SEQ ID NO: 18670 - DNA, 119 bp, homo sapiens
gacttgatgagcaaagtctatttgacaaaataggcataattcttgaagaggtatcatttccactgactaaacaggaggttgtgccccagctgaagcagaggctgaggtcactggaaagg

SEQ ID NO: 18671 - DNA, 119 bp, homo sapiens
cactgactaaaacaggaggttgtgccccagctgaagcagaggctgaggtcactggaaaggaacccaaagtaaatttgctccggtaactgaaagcacatttactgctcttgctgaagaaa

SEQ ID NO: 18672 - DNA, 119 bp, homo sapiens
aacccaaagataaatttgctccggtaactgaaagcacatttactgctcttgctgaagaaaccactgattattaacaggggtaatattctgactcacaaaatttgagcttactggaactg

SEQ ID NO: 18673 - DNA, 119 bp, homo sapiens
ccactgattcattaacaggggtaatattctgactcacaaaatttgagcttactggaactgaattaccactgttgacaatggcaaaatatagcccttgctacttttgtcttctccttttg

SEQ ID NO: 18674 - DNA, 119 bp, homo sapiens
aattaccacttgttgacaatggcaaaatatagcccttgctacttttgtcttctccttttggggttacatttgtaatatgttaattgatggtatagctggcacagtgcctgaagtattta

SEQ ID NO: 18675 - DNA, 119 bp, homo sapiens
gggttacattttgtaatatgttaattgatggtatagctggcacagtgcctgaagtatttacaattgcttacctatgtttagtccaattttcacatcctttatctgagacacagctggtg

SEQ ID NO: 18676 - DNA, 119 bp, homo sapiens
caattgcttgacctatgtttagtccaattttcacatcctttatctgagacacagctggtgatgaatttattttattggtgtgcccactgtagacggaatcagtactatttggggttgct

SEQ ID NO: 18677 - DNA, 119 bp, homo sapiens
atgaatttatttttattggtgtgcccactgtagacggaatcagtactatttggggttgctctggagtctaacatatgctttatgcaatggaggaggaagagtttgttttaatgattctg

SEQ ID NO: 18678 - DNA, 119 bp, homo sapiens
ctggagtcttaacatatgctttatgcaatggaggaggaagagtttgttttaatgattctgcaacaagagtggggttgatgtaccactaggaactggggcattaataaaaactaatttct

SEQ ID NO: 18679 - DNA, 119 bp, homo sapiens
caacaagagttggggttgatgtaccactaggaactggggcattaataaaaactaatttctgggcagaaaacctgtagatgtcagcgcaggtgtcatattaattgcagttccattgccag

SEQ ID NO: 18680 - DNA, 119 bp, homo sapiens
gggcagaaacacctgtagatgtcagcgcaggtgtcatattaattgcagttccattgccagaagaaagaaagatggagctgataccagcataagtttctgaactggagtcccactgatta

SEQ ID NO: 18681 - DNA, 119 bp, homo sapiens
aagaaagaatagatggagctgataccagcataagtttctgaactggagtcccactgattacatctccattgttgctgctgttgcttctgaccttgtaacagggtaactttttgtgatat

SEQ ID NO: 18682 - DNA, 119 bp, homo sapiens
catctccatttgttgctgctgttgcttctgaccttgtaacagggtaactttttgtgatataatctacttttgctgtttagttggagtatgaataatatttgcattgttttgtccaaaat

SEQ ID NO: 18683 - DNA, 119 bp, homo sapiens
aatctacttgttgctgtttagttggagtatgaataatatttgcattgttttgtccaaaatttgctgctgtatgctaattacacttaccgaactacttgttgttgatggtagtagagtac

SEQ ID NO: 18684 - DNA, 119 bp, homo sapiens
ttgctgctgatatgctaattacacttaccgaactacttgttgttgatggtagtagagtactagaacaaaagaggacttcaagggagaagagggcatgtgtgaagttttatctatcacgt

SEQ ID NO: 18685 - DNA, 119 bp, homo sapiens
tagaacaaatagaggacttcaagggagaagagggcatgtgtgaagttttatctatcacgtggcccaaataccactgccagtggtgtggcctaatgtaagtttgagatttttccccatgg

SEQ ID NO: 18686 - DNA, 119 bp, homo sapiens
ggcccaaatcaccactgccagtggtgtggcctaatgtaagtttgagatttttccccatggatggggcaagctagctggaatggaaacagaagttggtgtttggctaaaaggtgaaagac

SEQ ID NO: 18687 - DNA, 119 bp, homo sapiens
atggggcaaagctagctggaatggaaacagaagttggtgtttggctaaaaggtgaaagactagatgtagagttgttccagctacaggtgaaaaagcagaggaagaagttgttgattttg

SEQ ID NO: 18688 - DNA, 119 bp, homo sapiens
tagatgtagtagttgttccagctacaggtgaaaaagcagaggaagaagttgttgattttggcaccagaatgcctgcagctgaggagcaaaagtgaaaactgaacttgaagatacagtat

SEQ ID NO: 18689 - DNA, 119 bp, homo sapiens
gcaccagaaatgcctgcagctgaggagcaaaagtgaaaactgaacttgaagatacagtattgggtgaatttgatctgggttggtctgtacttttacaactccagtgttcccacctcgtg

SEQ ID NO: 18690 - DNA, 119 bp, homo sapiens
tgggtgaattttgatctgggttggtctgtacttttacaactccagtgttcccacctcgtgtcctaacaaaattgactgtgaatctcttatgcacacagttttcagctcttgctttgctt

SEQ ID NO: 18691 - DNA, 119 bp, homo sapiens
tcctaacaagaattgactgtgaatctcttatgcacacagttttcagctcttgctttgcttcagaagaatagcagtctgttgtgcaaaacagttgaaggaactaccaggatttgtagacc

SEQ ID NO: 18692 - DNA, 119 bp, homo sapiens
cagaagaatcagcagtctgttgtgcaaaacagttgaaggaactaccaggatttgtagacccatttagtgtgttgttgatgacagaggctgacctgtggaggaaatggtcggtgaagcac

SEQ ID NO: 18693 - DNA, 119 bp, homo sapiens
catttagtgttgttgttgatgacagaggctgacctgtggaggaaatggtcggtgaagcactgggcaagggaatgtggctgctgaaactgcattcttggcttttcctgcctcactctggc

SEQ ID NO: 18694 - DNA, 119 bp, homo sapiens
tgggcaaggagaatgtggctgctgaaactgcattcttggcttttcctgcctcactctggctagtcttaatgatggtgttaataagttacttacagaggttacaggcgacaaaggctgtg

SEQ ID NO: 18695 - DNA, 119 bp, homo sapiens
tagtcttaactgatggtgttaataagttacttacagaggttacaggcgacaaaggctgtggtctagcacacttatatttgataaaggtgtaattgttttgttgaaagctgtatttggta

SEQ ID NO: 18696 - DNA, 119 bp, homo sapiens
gtctagcactacttatatttgataaaggtgtaattgttttgttgaaagctgtatttggtagttgggtagaacagttcctggtgagttgacaaaaactgatgctaaagaagaatttatat

SEQ ID NO: 18697 - DNA, 119 bp, homo sapiens
gttgggtagaaacagttcctggtgagttgacaaaaactgatgctaaagaagaatttatatttgttgtcttgggaaagatgaacaatgttgttctgtacctttctgttgaagtggtggca

SEQ ID NO: 18698 - DNA, 119 bp, homo sapiens
ttgttgtctgtgggaaagatgaacaatgttgttctgtacctttctgttgaagtggtggcacttcttttgaactgcttttccttctttatgctgaatcacaaaattcttaggcagaataa

SEQ ID NO: 18699 - DNA, 119 bp, homo sapiens
cttcttttgcaactgcttttccttctttatgctgaatcacaaaattcttaggcagaataagaacttgctcatgattttttctcctgttttaggatccaccataggctgcacctgaatct

SEQ ID NO: 18700 - DNA, 119 bp, homo sapiens
gaacttgctgcatgattttttctcctgttttaggatccaccataggctgcacctgaatctttacagagcattttgaagatctattggcaaccactggccacagggcattttgtatacca

SEQ ID NO: 18701 - DNA, 119 bp, homo sapiens
ttacagagctattttgaagatctattggcaaccactggccacagggcattttgtataccatttgtaaagaccttttgtattggtgtggcaggtcaatgctggctttatcgggcttgctt

SEQ ID NO: 18702 - DNA, 119 bp, homo sapiens
tttgtaaaggaccttttgtattggtgtggcaggtcaatgctggctttatcgggcttgcttccggaggagtaaaactggtttttccacagcaagagcatttctacctgtggaaggaggca

SEQ ID NO: 18703 - DNA, 119 bp, homo sapiens
ccggaggagataaaactggtttttccacagcaagagcatttctacctgtggaaggaggcagttgatttgtaaggtcactttattcccaatattctttgcaagcaaagcctgaatgggtt

SEQ ID NO: 18704 - DNA, 119 bp, homo sapiens
gttgatttgttaaggtcactttattcccaatattctttgcaagcaaagcctgaatgggtttggtcccttctggagagtagacactggtactgaatccaatgaggcaaatgactctggaa

SEQ ID NO: 18705 - DNA, 119 bp, homo sapiens
tggtccctttctggagagtagacactggtactgaatccaatgaggcaaatgactctggaaatgatggcttgtatgctttgattcactgaaacagtcaatctgcacatcactttctagat

SEQ ID NO: 18706 - DNA, 119 bp, homo sapiens
atgatggctctgtatgctttgattcactgaaacagtcaatctgcacatcactttctagattctcaactgtgtctcatttgtgcttaactttgccttcttccttggagaaagctcttttg

SEQ ID NO: 18707 - DNA, 119 bp, homo sapiens
tctcaactgttgtctcatttgtgcttaactttgccttcttccttggagaaagctcttttgtgctgtcatcacataatcagtttgtttggactgtcgtttaagtgttttaagcagtgtct

SEQ ID NO: 18708 - DNA, 119 bp, homo sapiens
tgctgtcatccacataatcagtttgtttggactgtcgtttaagtgttttaagcagtgtcttcggtaagtttttgaaggcaattcctttttcaacagcttgcttctagccataggaaaat

SEQ ID NO: 18709 - DNA, 119 bp, homo sapiens
tcggtaagtcttttgaaggcaattcctttttcaacagcttgcttctagccataggaaaatctatttctgcaacttcatatcatctgaaaattataaaaacgggcattttgtttatataa

SEQ ID NO: 18710 - DNA, 119 bp, homo sapiens
acttaaaaaaaaagtttaatgcttacctgaatcaaagtgatctttctccaggatatccagaggttctgtgagtctatagacttactgatttctcccttaggagagtcttttccaagatc

SEQ ID NO: 18711 - DNA, 119 bp, homo sapiens
aggttctgttgagtctatagacttactgatttctcccttaggagagtcttttccaagatctccttcacctcatcagtggtccatagttctctattaaatgtatcatgatcaggttgtct

SEQ ID NO: 18712 - DNA, 119 bp, homo sapiens
tccttcaccttcatcagtggtccatagttctctattaaatgtatcatgatcaggttgtcttctgaaatctcatagtctttcttcaggcggctcctgaaataaaatgcccaacataataa

SEQ ID NO: 18713 - DNA, 119 bp, homo sapiens
tgttagcttaccagatttgtgcttcttgtgttttgctttttttttgatgatcaataacttattctggattcaggtttgtaagacttgaatgcaagagaatgaagaccttcacgctttct

SEQ ID NO: 18714 - DNA, 119 bp, homo sapiens
attctggatctcaggtttgtaagacttgaatgcaagagaatgaagaccttcacgctttctctgtaagtttcattcaaaacatctttcaatttcttttttttctttttcttcttttttgc

SEQ ID NO: 18715 - DNA, 119 bp, homo sapiens
ctgtaagttttcattcaaaacatctttcaatttcttttttttctttttcttcttttttgccctcattttgttagtttgagtttcttgtggctctgtagtgactgctctaatagaatatc

SEQ ID NO: 18716 - DNA, 119 bp, homo sapiens
cctcattttagttagtttgagtttcttgtggctctgtagtgactgctctaatagaatatcccttacaacttgtggcagttaatttctggatgatcactgtgacttccatttacatgtat

SEQ ID NO: 18717 - DNA, 119 bp, homo sapiens
ccttacaactttgtggcagttaatttctggatgatcactgtgacttccatttacatgtatttggcaagatttagagtattttcttttaatggactgggttcaatctttattctggaagc

SEQ ID NO: 18718 - DNA, 119 bp, homo sapiens
ttggcaagattttagagtattttcttttaatggactgggttcaatctttattctggaagcttcaccgtattttcctgattttctataaaccttatttcacctggactaagaggctctcc

SEQ ID NO: 18719 - DNA, 119 bp, homo sapiens
ttcaccgtatttttcctgattttctataaaccttatttcacctggactaagaggctctccaaagccagtacttcccctggactccttggtttctctaaattttctttacaacaatcagt

SEQ ID NO: 18720 - DNA, 119 bp, homo sapiens
aaagccagtaacttcccctggactccttggtttctctaaattttctttacaacaatcagtttttttaattcacaaggcctgcgaattctaatttcatagttggattttactcccatttc

SEQ ID NO: 18721 - DNA, 119 bp, homo sapiens
ttttttaatttcacaaggcctgcgaattctaatttcatagttggattttactcccatttcaacagagattcatgattatccaagatcattttagcaggacagcaagctggatcaaaatt

SEQ ID NO: 18722 - DNA, 119 bp, homo sapiens
aacagagatgtcatgattatccaagatcattttagcaggacagcaagctggatcaaaattattttcctgtctttcttgaaggaagagggcaggctatctctgctacatctatgttctcc

SEQ ID NO: 18723 - DNA, 119 bp, homo sapiens
attttcctgctctttcttgaaggaagagggcaggctatctctgctacatctatgttctccattacttgtctaacatagtcacacttcaatttctccaatttaatccgaggtactctttg

SEQ ID NO: 18724 - DNA, 119 bp, homo sapiens
attacttgtactaacatagtcacacttcaatttctccaatttaatccgaggtactctttgtattttaatggtggaattggaaattctggggcctgaaagggtctctgtttataaatccg

SEQ ID NO: 18725 - DNA, 119 bp, homo sapiens
tattttaatgggtggaattggaaattctggggcctgaaagggtctctgtttataaatccgtacatctgcccacagaactgtggaaaatgtacataagcattctccaaataatcataacc

SEQ ID NO: 18726 - DNA, 119 bp, homo sapiens
tacatctgcaccacagaactgtggaaaatgtacataagcattctccaaataatcataaccaagaataactccctgcattcatggataggctgtccaagtacagcatcttgaacttcctt

SEQ ID NO: 18727 - DNA, 119 bp, homo sapiens
aagaataacttccctgcattcatggataggctgtccaagtacagcatcttgaacttccttttgtgtttctacacaaagtcacaaagacccttaagtagccacactttttggtaaaaagg

SEQ ID NO: 18728 - DNA, 119 bp, homo sapiens
ttgtgtttcatacacaaagtcacaaagacccttaagtagccacactttttggtaaaaaggtagttcgtgaaaggtttttcttccaatggattaacttctccaagaactttaaaaaactg

SEQ ID NO: 18729 - DNA, 119 bp, homo sapiens
tagttcgtgaaaaggtttttcttccaatggattaacttctccaagaactttaaaaaactgaggacacaacccagtttttcagcacagttatcaggattttcagtttgccctacagcagt

SEQ ID NO: 18730 - DNA, 119 bp, homo sapiens
aggacacaaccccagtttttcagcacagttatcaggattttcagtttgccctacagcagtgtaccactgtgtactttctgcctcagcgctgcttcccaggtcctataaggcaaagtagg

SEQ ID NO: 18731 - DNA, 119 bp, homo sapiens
gtaccactgttgtactttctgcctcagcgctgcttcccaggtcctataaggcaaagtaggtcttcgatgaaggtaggtctgcgatggggaggacttaatagagaagtcattattttcga

SEQ ID NO: 18732 - DNA, 119 bp, homo sapiens
tcttcgatgtaaggtaggtctgcgatggggaggacttaatagagaagtcattattttcgatagaaaagcttacactgaggcatcagaagacaacgttccaattcgtaaaagactatttc

SEQ ID NO: 18733 - DNA, 119 bp, homo sapiens
tagaaaagcattacactgaggcatcagaagacaacgttccaattcgtaaaagactatttctggcaaattagaatttgctgagctaaacaaaggaaatgcccaatagctggaatttccca

SEQ ID NO: 18734 - DNA, 119 bp, homo sapiens
tggcaaatttagaatttgctgagctaaacaaaggaaatgcccaatagctggaatttcccacatggtctcatacaagttggagctgcttgagctagaagttttctttcccattcttctat

SEQ ID NO: 18735 - DNA, 119 bp, homo sapiens
catggtctccatacaagttggagctgcttgagctagaagttttctttcccattcttctatttccttttgctagcttcttctgcttcttttctttcctgctcccgaagcctaaagaaatt

SEQ ID NO: 18736 - DNA, 119 bp, homo sapiens
atttttttcttaacatttaccttttttcttcttttgctctcagctgttcttcctgtctcaaaacttgaacattatagattcaaaaactccacttgtcaagcctgccaaacttcgcggtg

SEQ ID NO: 18737 - DNA, 119 bp, homo sapiens
aaacttgaaccattatagattcaaaaactccacttgtcaagcctgccaaacttcgcggtgttgaccgacccttgttgaggtacatgcagttcccttctcatcctccaatccataatagc

SEQ ID NO: 18738 - DNA, 119 bp, homo sapiens
ttgaccgacgccttgttgaggtacatgcagttcccttctcatcctccaatccataatagcctctagatgaactgctatcgttgtcttttctctcaagtgccttggagaagaataagtca

SEQ ID NO: 18739 - DNA, 119 bp, homo sapiens
gaccgggctcgcttaccgagagagaagcgctaacttctgctccagcatcatctccagcttctggccctgttggagatccagtggtccactccgtgcaggcggtagcacgtctccagcat

SEQ ID NO: 18740 - DNA, 119 bp, homo sapiens
ctggccctgtttggagatccagtggtccactccgtgcaggcggtagcacgtctccagcatcaacctgaatccgccacgaactcggtgatgcccccgtactggccgctggcgaacttctc

SEQ ID NO: 18741 - DNA, 119 bp, homo sapiens
caacctgaagtccgccacgaactcggtgatgcccccgtactggccgctggcgaacttctcttccatctgagcagacacatgccctgtccgggctgctgcgggaaggcgcgaccgccccg

SEQ ID NO: 18742 - DNA, 119 bp, homo sapiens
ttccatctgcagcagacacatgccctgtccgggctgctgcgggaaggcgcgaccgccccggcccccgctcgcggcccttccgccacctcctcctccgcggtggcaacgccccccaaggg

SEQ ID NO: 18743 - DNA, 119 bp, homo sapiens
gcccccgctgcgcggcccttccgccacctcctcctccgcggtggcaacgccccccaagggctgcagaaaggggcggtgaggccccggtgcttctcctgcaggaactcgcccaggatgcg

SEQ ID NO: 18744 - DNA, 119 bp, homo sapiens
ctgcagaaagggggcggtgaggccccggtgcttctcctgcaggaactcgcccaggatgcggtagccctgtgtagctcgtaggtcagctcctgctccttgcagcaaccgcctccgatcac

SEQ ID NO: 18745 - DNA, 119 bp, homo sapiens
gtagccctgctgtagctcgtaggtcagctcctgctccttgcagcaaccgcctccgatcaccatcgcctcatctcttcctcctgatcgtccgcgtcctccagcgaggaggcactccttcc

SEQ ID NO: 18746 - DNA, 119 bp, homo sapiens
catcgcctccatctcttcctcctgatcgtccgcgtcctccagcgaggaggcactccttccgtgggccggcctgaggtctgggccgccgctgccacctcctcctcgtcgtcctctccttc

SEQ ID NO: 18747 - DNA, 119 bp, homo sapiens
gtgggccggccctgaggtctgggccgccgctgccacctcctcctcgtcgtcctctccttcggccgccggggcggccgctcttcctccccagccggctccatcgctcccggcgtcccggg

SEQ ID NO: 18748 - DNA, 119 bp, homo sapiens
ggccgccggtggcggccgctcttcctccccagccggctccatcgctcccggcgtcccgggcacactcatccccggcaggcctaggctgggcggtgtggaacagccgctcgaggtgctgg

SEQ ID NO: 18749 - DNA, 119 bp, homo sapiens
cacactcatgccccggcaggcctaggctgggcggtgtggaacagccgctcgaggtgctgggggacgcgtagcgcgagccgcttcctcacggctcggccgcggcgcgtagcccccgccac

SEQ ID NO: 18750 - DNA, 119 bp, homo sapiens
gggacgcgtgagcgcgagccgcttcctcacggctcggccgcggcgcgtagcccccgccacatcgggcctgctctcctcagccgccggctcggctcggtgcgcgcgggggtcttgagctc

SEQ ID NO: 18751 - DNA, 119 bp, homo sapiens
atcgggcctggctctcctcagccgccggctcggctcggtgcgcgcgggggtcttgagctcaccgccggcgggcggggttacatggcgcgcgaggaggggggagagaagaggagagccta

SEQ ID NO: 18752 - DNA, 119 bp, homo sapiens
taaatgatgacttcccccaaagctttgcttttcttcatttggcttgcgtcagaaacacaaggctcggcaagcgaaggcttgcacccgcctcccgggacccctcaggccgccacctctgc

SEQ ID NO: 18753 - DNA, 119 bp, homo sapiens
ggctcggcacagcgaaggcttgcacccgcctcccgggacccctcaggccgccacctctgctgccaggcatccaggtcctcagcttcccggggcccttgttccgtgaactctgtgctcag

SEQ ID NO: 18754 - DNA, 119 bp, homo sapiens
tgccaggcagtccaggtcctcagcttcccggggcccttgttccgtgaactctgtgctcagctgccacacttcactgtgccctgggcatcgcccgcagccaagagctgagtctgctggct

SEQ ID NO: 18755 - DNA, 119 bp, homo sapiens
ctgccacaccttcactgtgccctgggcatcgcccgcagccaagagctgagtctgctggctgttgaactcagacagtagacagggctttcatcctgggtttgcttgatcaaaactgtggg

SEQ ID NO: 18756 - DNA, 119 bp, homo sapiens
gttgaactccagacagtagacagggctttcatcctgggtttgcttgatcaaaactgtgggtttctgggacttttctggagatcaaacagctgcacgtcacctgcaaagagagacagata

SEQ ID NO: 18757 - DNA, 119 bp, homo sapiens
ccaccccttaaacagatccaggcctagcggccccttcctacctttcccagaggcagctgcaaaaaccaaggccgcactggggaccagcgcacagcaaacagatacttgagggagagctg

SEQ ID NO: 18758 - DNA, 119 bp, homo sapiens
aaaaaccaagggccgcactggggaccagcgcacagcaaacagatacttgagggagagctgcagcgaagtaagggaggggcctgcagcatggagtacaggtggacatgcccgtcagtccc

SEQ ID NO: 18759 - DNA, 119 bp, homo sapiens
cagcgaagtcaagggaggggcctgcagcatggagtacaggtggacatgcccgtcagtcccagcgctcagaagagattcctagacgggatgcagggggccaggcaagggaatcagtgctg

SEQ ID NO: 18760 - DNA, 119 bp, homo sapiens
gtacctgtggaagggggaacagctcacagagtagatgggaccgccgtggggggagaaggtaaactgtgcggggcccgcaggggcacggagctgggcatccgcgtgagggctgcctctcc

SEQ ID NO: 18761 - DNA, 119 bp, homo sapiens
aaactgtgctggggcccgcaggggcacggagctgggcatccgcgtgagggctgcctctccagctgccaggaacacttgagcgggaagccgccttccgtgcccagaatgaacagcctagg

SEQ ID NO: 18762 - DNA, 119 bp, homo sapiens
agctgccagggaacacttgagcgggaagccgccttccgtgcccagaatgaacagcctagggtcaaagctgagaaggccactgccgtggcgcccacctcggtctccccgcggggatgctg

SEQ ID NO: 18763 - DNA, 119 bp, homo sapiens
ggcgcaggccagggcagtttccgggtgcccacgtaccttcttgagcttggtgctccgtggcagctgctgatgaccagggcgaagccctctgtgagctgcagctggcctaccccgatgcc

SEQ ID NO: 18764 - DNA, 119 bp, homo sapiens
cagctgctgcatgaccagggcgaagccctctgtgagctgcagctggcctaccccgatgccctgccagagagcaccttcccgtcggtggccacactcagcacctggaagcggtggctgtg

SEQ ID NO: 18765 - DNA, 119 bp, homo sapiens
ctgccagagtagcaccttcccgtcggtggccacactcagcacctggaagcggtggctgtgcccaggctcggcagccacaccacctgagttaacagcatgcagggccaggatggagacaa

SEQ ID NO: 18766 - DNA, 119 bp, homo sapiens
agtcctgagaggagaggaggcggacacagcaggcagctcacctgcgacgtgggagggctgcgtggggtgaaggccagacacaggacagcgctggggacctccaccacggccgacggctg

SEQ ID NO: 18767 - DNA, 119 bp, homo sapiens
cgtggggtggaaggccagacacaggacagcgctggggacctccaccacggccgacggctgctggggacgaggtctcgccggtccaggttccaggcacacacgaaggacttaagcgtgct

SEQ ID NO: 18768 - DNA, 119 bp, homo sapiens
ctggggacgcaggtctcgccggtccaggttccaggcacacacgaaggacttaagcgtgctccagtcccctggtccagcctgtgcagggacaggcttgagccggctgtgcccctgggtgg

SEQ ID NO: 18769 - DNA, 119 bp, homo sapiens
cgaggctgcaccagcccatcccctaccatctgctgctgctcggtccagttcacctcgaagccatcaaaccgtggctctgccaattcttgttcagctctcggatgaccatggcctccact

SEQ ID NO: 18770 - DNA, 119 bp, homo sapiens
ccatcaaacgcgtggctctgccaattcttgttcagctctcggatgaccatggcctccactctccgaagaaggctgcgagcctgggtatgtcatactgggacgggggctgcacgctgaca

SEQ ID NO: 18771 - DNA, 119 bp, homo sapiens
ctccgaagaaaggctgcgagcctgggtatgtcatactgggacgggggctgcacgctgacaggcacggggcctccgtctgcacctgggcgtccacatgattcctggcctgggcggatgca

SEQ ID NO: 18772 - DNA, 119 bp, homo sapiens
ggcacgggggcctccgtctgcacctgggcgtccacatgattcctggcctgggcggatgcactggcagtgcaatgctggccgtctggcaacttttctggggggagggtgaaaacaagtgt

SEQ ID NO: 18773 - DNA, 119 bp, homo sapiens
ctccgcgcggggcccgcgccctcaccgtctcccagcggatgccctggacggccctccactgcgagggcaggacgccacacccagggtctcgtcctgcagcggccctggccgccccggcc

SEQ ID NO: 18774 - DNA, 119 bp, homo sapiens
gcgagggcacggacgccacacccagggtctcgtcctgcagcggccctggccgccccggccccgggccgccgcaaccccgactgtcgccagcgccgcaacaccagcgcttcccgcctggc

SEQ ID NO: 18775 - DNA, 119 bp, homo sapiens
ccgggccgctcgcaaccccgactgtcgccagcgccgcaacaccagcgcttcccgcctggctgagtggcccggctgcgcgcgggttgccatggagacggttccgccctctcgtgcggacg

SEQ ID NO: 18776 - DNA, 119 bp, homo sapiens
tgagtggccccggctgcgcgcgggttgccatggagacggttccgccctctcgtgcggacgcactcaggccgacctccgcccctacgccgccatgagcggaaaacggggaatgtgaggct

SEQ ID NO: 18777 - DNA, 119 bp, homo sapiens
cactcaggcgcgacctccgcccctacgccgccatgagcggaaaacggggaatgtgaggctgacggcgcctgtttgaattggtcgcagcgcctcctgcaagacctggaagaaagaaaagt

SEQ ID NO: 18778 - DNA, 119 bp, homo sapiens
atgcgccgtagctcttcagctcgggaaggctatatttagcaggtttccggaagttgccggactggctgtaggcggtcctgcctcgctgccttcagtccctagtgtctgggtccccgccc

SEQ ID NO: 18779 - DNA, 119 bp, homo sapiens
actggctgtgaggcggtcctgcctcgctgccttcagtccctagtgtctgggtccccgccctccagccgctttgagtcgtgcctgggtcctcgcccttgcctcagaaccgcgaagaaagg

SEQ ID NO: 18780 - DNA, 119 bp, homo sapiens
tccagccgcctttgagtcgtgcctgggtcctcgcccttgcctcagaaccgcgaagaaaggaagctcgcggtttgctagaaaacctagttgggagtgcgaggcagagaacgttcagcacc

SEQ ID NO: 18781 - DNA, 119 bp, homo sapiens
aagctcgcgtgtttgctagaaaacctagttgggagtgcgaggcagagaacgttcagcacctttgttcctccgaaccctcgggacagaggcagggttctgagggcagggattccccctcg

SEQ ID NO: 18782 - DNA, 119 bp, homo sapiens
tttgttcctcccgaaccctcgggacagaggcagggttctgagggcagggattccccctcgtcttggcccaccgcccgggctgggcactaaactcgggccgcggcggggcgagcgaggcg

SEQ ID NO: 18783 - DNA, 119 bp, homo sapiens
tcttggccccaccgcccgggctgggcactaaactcgggccgcggcggggcgagcgaggcgggctccggaggagctgacgcctgatgatggcgcaggtagacacacctgccccttctcgg

SEQ ID NO: 18784 - DNA, 119 bp, homo sapiens
ttgtttttattttatgctagacacaacttcgaaaccagctaattcatgagttgatgcaccctgtattgatggagaactgcagcctcggtccatttcagtagaagggagctccctcttaa

SEQ ID NO: 18785 - DNA, 119 bp, homo sapiens; identical to SEQ ID NO: 15842

SEQ ID NO: 18786 - DNA, 119 bp, homo sapiens
taggcgcctctaactctttagtggcagatcacttacaaagatgtggctatgaatattcactttctgtttctttccagaaagtggtttggcaaaagaaaaggtaaagtctttccttttct

SEQ ID NO: 18787 - DNA, 119 bp, homo sapiens
acgcacctgacgatgtttctatgtcctaatttgatgtgttattttttaatagctgagaagcttcagcttttgatgatcagtttgcagatgcttaccctcagcgtatcaagttcgaatct

SEQ ID NO: 18788 - DNA, 119 bp, homo sapiens
cttcagcttattgatgatcagtttgcagatgcttaccctcagcgtatcaagttcgaatctttagaaataagctaaatgagtataagagagaaatagaagagcaacttcgggcagaaatg

SEQ ID NO: 18789 - DNA, 119 bp, homo sapiens
ttagaaataaagctaaatgagtataagagagaaatagaagagcaacttcgggcagaaatgtgtcaaaagtaagctttatcttgttactgtaaacaagagtgatgtttttgtttgtcttc

SEQ ID NO: 18790 - DNA, 119 bp, homo sapiens
tggtatttttaattttttgtgatcaatttgcagttgaagttttttaaagataccgagatagcaaaaattaaatggaagcaaaaaaaaagtatgaaaaggagttaaccatgttccagaat

SEQ ID NO: 18791 - DNA, 119 bp, homo sapiens; identical to SEQ ID NO: 15847

SEQ ID NO: 18792 - DNA, 119 bp, homo sapiens
gattttgaaaaagcttgtcaagcaaaatctgaagctctcgttcttcgggaaaagagtacccttgaaagattcacaagcaccaagaggtggtatttacaaatattttatgggtggctatt

SEQ ID NO: 18793 - DNA, 119 bp, homo sapiens
gtaaattttcctttttgaattttagcttgaattagagtctgtcaaagcccagtctttggcaataacaaacaaaaccatatgctgaatgaaaaggttaaagagatgagtgattattcact

SEQ ID NO: 18794 - DNA, 119 bp, homo sapiens; identical to SEQ ID NO: 15850

SEQ ID NO: 18795 - DNA, 119 bp, homo sapiens
actaaaagaagagaaactggagcttctggcacaaaataaattacttaaacaacaactggaagagagtagaatgaaaacctgcgtctcctaaaccgtatgtatttttcttttcttctgac

SEQ ID NO: 18796 - DNA, 119 bp, homo sapiens
agaaaacttaaggttggtaatgactaggattttttttttttttttaccttcttaggcctagctcagccgctcctgaacttgcagtctttcagaaagaactacggaaagccgaaaaggct

SEQ ID NO: 18797 - DNA, 119 bp, homo sapiens
gctcagccggctcctgaacttgcagtctttcagaaagaactacggaaagccgaaaaggctatagtggttagcatgaggagttcgaaagctgcaggcaagctctgcacaaacaactgcaa

SEQ ID NO: 18798 - DNA, 119 bp, homo sapiens
atagtggttgagcatgaggagttcgaaagctgcaggcaagctctgcacaaacaactgcaagacgaagtggtattgctcttcttcagttctagtgtgataccagtacacttcatagttac

SEQ ID NO: 18799 - DNA, 119 bp, homo sapiens
ctgaaattggctttttgtaccctgcagccctagagaatgaagtgtactgcaatccaaagcagtctgtgacgatcgttctgtcaatggattaataaatggcaatgtggtgccttgcaatg

SEQ ID NO: 18800 - DNA, 119 bp, homo sapiens
agtctgtgatcgatcgttctgtcaatggattaataaatggcaatgtggtgccttgcaatggtgagataatggggatttcttgaacaatccttttaaacaggaaaacgttctagcacgta

SEQ ID NO: 18801 - DNA, 119 bp, homo sapiens
gtgagataagtggggatttcttgaacaatccttttaaacaggaaaacgttctagcacgtatggttgcataaggatcacaaattatccaactgcatgggtggagggtagttcccctgatt

SEQ ID NO: 18802 - DNA, 119 bp, homo sapiens
tggttgcatcaaggatcacaaattatccaactgcatgggtggagggtagttcccctgattctgaccttggtttgtagccaatactaaggcaagggtcaaagagcttcagcaagaggccg

SEQ ID NO: 18803 - DNA, 119 bp, homo sapiens
ctgaccttgagtttgtagccaatactaaggcaagggtcaaagagcttcagcaagaggccgaacgcttggaaaggctttcagaagttaccatcggagagtcattaaaaactctgccaaaa

SEQ ID NO: 18804 - DNA, 119 bp, homo sapiens
aacgcttggaaaaggctttcagaagttaccatcggagagtcattaaaaactctgccaaaagcccactagagcaaagagcccaccatctctgcacttgctggaagccttcaaaaacatta

SEQ ID NO: 18805 - DNA, 119 bp, homo sapiens
gcccactagcagcaaagagcccaccatctctgcacttgctggaagccttcaaaaacattacttccagttcccggaaagacatatttttggagaggacagagttgtctctgagcagcctc

SEQ ID NO: 18806 - DNA, 119 bp, homo sapiens
cttccagttccccggaaagacatatttttggagaggacagagttgtctctgagcagcctcaagtgggcaacttgaagaaaggaatgacgtcgtggaagcactgacaggcagtgcagcct

SEQ ID NO: 18807 - DNA, 119 bp, homo sapiens
aagtgggcacacttgaagaaaggaatgacgtcgtggaagcactgacaggcagtgcagcctcgaggctcccgggggcacttcctccagacgcctctcttccacaccccttccaaaagcaa

SEQ ID NO: 18808 - DNA, 119 bp, homo sapiens
cgaggctccgcgggggcacttcctccagacgcctctcttccacaccccttccaaaagcaaaaagaagcccgaaagtgaaatgtatctggaaggtaagccacccgcacaaagggttgcgg

SEQ ID NO: 18809 - DNA, 119 bp, homo sapiens
tggtatcttctccgtgcaattggtaatattcttgccttggttctttctgcaccttaggtctgggcagatacacattgcttcccccagtccttgtcctgacagaatgcccctaccatcac

SEQ ID NO: 18810 - DNA, 119 bp, homo sapiens
tgggcagatcacacattgcttcccccagtccttgtcctgacagaatgcccctaccatcacccactgagttaggcacagcctctccatccctcctgtctccagccctccggagcagaaag

SEQ ID NO: 18811 - DNA, 119 bp, homo sapiens
ccactgagtctaggcacagcctctccatccctcctgtctccagccctccggagcagaaagtggggtaagataacgttctgattgattagcttcagctgaataatgttacttgctctgtc

SEQ ID NO: 18812 - DNA, 119 bp, homo sapiens
atctgatactggaagctactctttattttctgtcctattaggtgtagatcagaaacaaattgaagaacaaaggaagaagaaaaaatacgggaacagcaagtgaaagaacgaaggcagag

SEQ ID NO: 18813 - DNA, 119 bp, homo sapiens
tgaagaacaaaaggaagaagaaaaaatacgggaacagcaagtgaaagaacgaaggcagagagaagaaagaggcagagtaacctacaagaagttttagaaagggaacgaagagaactaga

SEQ ID NO: 18814 - DNA, 119 bp, homo sapiens
agaagaaagaaggcagagtaacctacaagaagttttagaaagggaacgaagagaactagaaaaactgtacaggaaagggtaataagtatgacttgattctctgaactggttgctccatt

SEQ ID NO: 18815 - DNA, 119 bp, homo sapiens
tttgtgtattttctgttttggtgcctgttttatagaagatgattgaagaatcactgaagattaaaataaaaaggaattagaaatggaaaatgaattagaaatgagtaatcaagaaataa

SEQ ID NO: 18816 - DNA, 119 bp, homo sapiens; identical to SEQ ID NO: 15869

SEQ ID NO: 18817 - DNA, 119 bp, homo sapiens
aagacaaatctgctcacagtgaaaatcctttagagaaatacatgaaaatcatccagcaggagcaagaccggagtcggcagataaggtgccagtgccatgggcagggcaatctgtgggtg

SEQ ID NO: 18818 - DNA, 119 bp, homo sapiens
agtttaacaggcttttctcatgaagaactagacgactcttggtaaccatgtttgctgcccagcttctaattacataccgtgagaagttacgtaacatttactcctttgtaaatgtttcc

SEQ ID NO: 18819 - DNA, 119 bp, homo sapiens
agcttctaacttacataccgtgagaagttacgtaacatttactcctttgtaaatgtttccctatcatcaacaaaactcaataaaaatgtgtgtaatccaatgtgggtttttttttccat

SEQ ID NO: 18820 - DNA, 119 bp, homo sapiens
ctatcatcagacaaaactcaataaaaatgtgtgtaatccaatgtgggtttttttttccataattaatttgataccatagtgtgtgaaccaagaataatctagtcacgtgaaacctcttc

SEQ ID NO: 18821 - DNA, 119 bp, homo sapiens
aattaattttgataccatagtgtgtgaaccaagaataatctagtcacgtgaaacctcttctccagtcatgtatttctcattcattataataaaagtaactggcttttaacctccttatt

SEQ ID NO: 18822 - DNA, 119 bp, homo sapiens
ccgagagcagcggccgggaaggggcggtgcgggaggcggggtgtggggcggtagtgtgggccctgttccgcccgcgcggtgttccgcattctgcaagcctccggagcgcacgtcggcag

SEQ ID NO: 18823 - DNA, 119 bp, homo sapiens
ccctgttcctgcccgcgcggtgttccgcattctgcaagcctccggagcgcacgtcggcagtcggctccccgttgaccgaatcaccgacctctctccccagctgtatttccaaaatgtcg

SEQ ID NO: 18824 - DNA, 119 bp, homo sapiens
tcggctccctcgttgaccgaatcaccgacctctctccccagctgtatttccaaaatgtcgctttctaacagctgacgctggacaagctggacgttaaagggaagcgggtcgttatgagg

SEQ ID NO: 18825 - DNA, 119 bp, homo sapiens
aggagtaacttcattctgtttgttgtctctctttggttgcaggattaaggctgctgtcccaagcatcaattctgcttggacaatggagccaagtcggtagtccttatgagccacctagg

SEQ ID NO: 18826 - DNA, 119 bp, homo sapiens
aagcatcaaattctgcttggacaatggagccaagtcggtagtccttatgagccacctaggccggcctgaggtgtgcccatgcctgacaagtactccttagagccagttgctgtagaact

SEQ ID NO: 18827 - DNA, 119 bp, homo sapiens
ccggcctgatggtgtgcccatgcctgacaagtactccttagagccagttgctgtagaactcaaatctctctgggcaagtaagtgccaggctctggtgctggtagactttgtggcggggg

SEQ ID NO: 18828 - DNA, 119 bp, homo sapiens
ttttaactttcatactgctcaagtgtcttcatctcttcctcttctcagggatgttctgttcttgaaggatgtgtaggcccagaagtggagaaagcctgtgccaacccagctgctgggtc

SEQ ID NO: 18829 - DNA, 119 bp, homo sapiens
cttgaaggactgtgtaggcccagaagtggagaaagcctgtgccaacccagctgctgggtctgtcatcctctggagaacctccgctttcatgtggaggaagaagggaagggaaaagatgc

SEQ ID NO: 18830 - DNA, 119 bp, homo sapiens
tgtcatcctgctggagaacctccgctttcatgtggaggaagaagggaagggaaaagatgcttctgggaaaaggtaggacctgtgattttgacattattgggggtgagggcctgagtctg

SEQ ID NO: 18831 - DNA, 119 bp, homo sapiens
gacctccatcattttggctcccctgtgtagattggcacttctctgtttgatgaagagggagccaagatttcaaagacctaatgtccaaagctgagaagaatggtgtgaagattaccttg

SEQ ID NO: 18832 - DNA, 119 bp, homo sapiens
gccaagattgtcaaagacctaatgtccaaagctgagaagaatggtgtgaagattaccttgcctgttgacttgtcactgctgacaagtttgatgagaatgccaagactggccaagccact

SEQ ID NO: 18833 - DNA, 119 bp, homo sapiens
cctgttgactttgtcactgctgacaagtttgatgagaatgccaagactggccaagccactgtggcttctgcatacctgctggctggatggtgagtcacttgagtgggttggtagtgtga

SEQ ID NO: 18834 - DNA, 119 bp, homo sapiens
gctcatcttctctttcacctctacccctcagggcttggactgtggtcctgaaagcagcaagaagtatgcgaggctgtcactcgggctaagcagattgtgtggaatggtcctgtgggggt

SEQ ID NO: 18835 - DNA, 119 bp, homo sapiens
gaagtatgctgaggctgtcactcgggctaagcagattgtgtggaatggtcctgtgggggtatttgaatggaagcttttgcccggggaaccaaagctctcatggatgaggtggtgaaagc

SEQ ID NO: 18836 - DNA, 119 bp, homo sapiens
atttgaatgggaagcttttgcccggggaaccaaagctctcatggatgaggtggtgaaagccacttctagggctgcatcaccatcataggtaagcggtcctatacaaagctaatacccat

SEQ ID NO: 18837 - DNA, 119 bp, homo sapiens
atgtgtgctctctcaaaaacaggtaaagtccttcctggggtggatgctctcagcaatatttagtactttctgccttttagttcctgtgcacagcccctaagtcaacttagcattttctg

SEQ ID NO: 18838 - DNA, 119 bp, homo sapiens
tagtactttcctgccttttagttcctgtgcacagcccctaagtcaacttagcattttctgcatctccactggcattagctaaaaccttccatgtcaagattcagctagtggccaagaga

SEQ ID NO: 18839 - DNA, 119 bp, homo sapiens
catctccacttggcattagctaaaaccttccatgtcaagattcagctagtggccaagagatgcagtgccggaacccttaaacagttgcacagcatctcagctcatcttcactgcaccct

SEQ ID NO: 18840 - DNA, 119 bp, homo sapiens
tgcagtgccaggaacccttaaacagttgcacagcatctcagctcatcttcactgcaccctggatttgcaacattcttcaagatcccatttgaattttttagtgactaaaccattgtgca

SEQ ID NO: 18841 - DNA, 119 bp, homo sapiens
ggatttgcatacattcttcaagatcccatttgaattttttagtgactaaaccattgtgcattctagagtcatatatttatattttgcctgttaaaaagaaagtgagcagtgttagctta

SEQ ID NO: 18842 - DNA, 119 bp, homo sapiens
ttctagagtgcatatatttatattttgcctgttaaaaagaaagtgagcagtgttagcttagttctctttgatgtaggttattatgattagctttgtcactgtttcactactcagcatgg

SEQ ID NO: 18843 - DNA, 119 bp, homo sapiens
gttctcttttgatgtaggttattatgattagctttgtcactgtttcactactcagcatggaaacaagataaattccatttgtaggtagtgagacaaaattgatgatccattaagtaaac

SEQ ID NO: 18844 - DNA, 119 bp, homo sapiens
aaacaagatgaaattccatttgtaggtagtgagacaaaattgatgatccattaagtaaacaataaaagttccattgaaaccgtgatttttttttttttcctgtcatactttgttaggaa

SEQ ID NO: 18845 - DNA, 119 bp, homo sapiens
aataaaagtgtccattgaaaccgtgatttttttttttttcctgtcatactttgttaggaagggtgagaaagaatcttgaggaacggatcagatgtctatattgctgaatgcaagaagtg

SEQ ID NO: 18846 - DNA, 119 bp, homo sapiens
gggtgagaatagaatcttgaggaacggatcagatgtctatattgctgaatgcaagaagtggggcagcagagtggagagatgggacaattagataaatgtccattctttatcaagggcct

SEQ ID NO: 18847 - DNA, 119 bp, homo sapiens
tataacaaaaaagccccagcccattcctcccattcaagattcccactccccagaggtgaccactttcaatcttgagtttttcaggtatatacctccatgtttctaagtaatatgcttat

SEQ ID NO: 18848 - DNA, 119 bp, homo sapiens
ggctctgttccacatatatttccacttcttcattctctcggtatagttttgtcacaattatagattagacaaaagtctacataactaatacagctgagctatgtagtatgctatgatta

SEQ ID NO: 18849 - DNA, 119 bp, homo sapiens
aggatgtggatgtagaagaggcagttctggggcagtatactgaagaacctctaagtcaagagccatctgagatgctggtgtggattgttcatcaattggcggggttccatttttccagg

SEQ ID NO: 18850 - DNA, 119 bp, homo sapiens
aggtgaagcacttcaaattgcctgatgaaagttgaatcaggaatgaagataaaagtacacaacaatgcaaaagcggtacttagcctcacaaagatggaaacattccaaaaacgtgaagt

SEQ ID NO: 18851 - DNA, 119 bp, homo sapiens
acttttactagtccgattttctggttgtgagttttttttgtttgttttttttttttcgagaaactgcagaggcttcttggaagtagaccaagggtgtccaatctttggcttccctgggc

SEQ ID NO: 18852 - DNA, 119 bp, homo sapiens
taggaatattgaaaatgaatatgggaaatatctatttaaagcaaagaaattattccaaagccattaaatctaccgaatggcattagaccaagttccaagtgtcaataagcaaatgaggt

SEQ ID NO: 18853 - DNA, 119 bp, homo sapiens
agtcatataggtattttccttgtaatattgaagtcattgagtggcttggagcctattacattgacacccattttgggaaaaagctattcagtactttgaaagagcttctcttatacagt

SEQ ID NO: 18854 - DNA, 119 bp, homo sapiens
ttcagatagtggccagaactatagtgccagtagtaaaggtgaacgactaagtgccagactcagagctttcctgggacaaatgaaccttatgaaagtagcagtaacaaagaaataggcaa

SEQ ID NO: 18855 - DNA, 119 bp, homo sapiens
cccagaaacttacagcctatttagatcttaacctggataagtgctatgtgatccctctgaacacttccatgttatgccacccagaaacctactggagttacttattaacatcaaggtat

SEQ ID NO: 18856 - DNA, 119 bp, homo sapiens
ccttgctggggaggatgctgatggtgctcccgctgctgctgcaccgcagagaagcgatgccccccacccagggaccagctccgccaggctcctgcagctacagtgtgctttggcctctc

SEQ ID NO: 18857 - DNA, 119 bp, homo sapiens
acctgcagctcggtctggaagaagaacttctgagggcactgtgagcagtcgtagatcttgtcctcctgccgtgcacggcaaagatgtgctgctgcaacttgttggcctggacgaagact

SEQ ID NO: 18858 - DNA, 119 bp, homo sapiens
aggatatgaaatgacttccacagggtatcggatgatagcattaatcacaaatggagcatctgcggccctcccaccagccagatggggttgggatcattcaggacggtggtaactgcaat

SEQ ID NO: 18859 - DNA, 119 bp, homo sapiens
ggctctacctgtgactcaccgttcctctcctggtaggcagcaacaatatgggtgaggtcgtagtcatagcaaaggggctggtcccgttgatcacggatatctgggacacgggaggagga

SEQ ID NO: 18860 - DNA, 119 bp, homo sapiens
tcctcctctctaaccttgatggccataaggaatttattccagttgtccttgttagcagccttccctggcgcttaaattcaattttgttcctcagaatggggtatcctgtggaggaagaa

SEQ ID NO: 18861 - DNA, 119 bp, homo sapiens
tgtgcccttaccggtacatgctgcttagctgggagtggcacctcaaagggaatgtctgtatcctgaaaacagagtggtcaaggccatctagagtcccttcctcgattgcctgcagtaga

SEQ ID NO: 18862 - DNA, 119 bp, homo sapiens
ccaccctcggggcacagcttccctactcacatcggtcaggtccaaaaagcgattgaggaagatgaatgcatgttatcccagccaactgcctgcagcaaagaagagttgcaaatgggagt

SEQ ID NO: 18863 - DNA, 119 bp, homo sapiens
gtcccagctcaccttggcagcaatgcctgcttcatagaaggctttgtctacaggtagtagctgggtgtgcgcaagagtgaaacagaaagcctggcagccacggtttcctgggattaaag

SEQ ID NO: 18864 - DNA, 119 bp, homo sapiens
cagctgtttgacactctgggctgcagagcgcgtggcatagtaatgagcgatcagcagcatcgtcttgaatcctcatgggctggagagtttgcctcactggacttcaccaggttttcaca

SEQ ID NO: 18865 - DNA, 119 bp, homo sapiens
ctcaccaggttgaagaggacatctcgaagatcagcccagctatgataggcctcggcacagttggttccagagagctcaccatgtcagtgaagatccttttgtagatattgaagttctag

SEQ ID NO: 18866 - DNA, 119 bp, homo sapiens
acctgtgggttagcaggggctccgtgctgtacatacagggccaatgcctgggcagagctaccctcccggtcaagtgagttgcatacaaagccacatacttgtgcagaatcttgtagttc

SEQ ID NO: 18867 - DNA, 119 bp, homo sapiens
tgggaagagagcagtacctgcttggtagctgtttcaatgcacttgtcccactggccctgctccacatacggtccaaagcagctatcacatccacacccaccagctgggtcaatggaaga

SEQ ID NO: 18868 - DNA, 119 bp, homo sapiens
tgcctcctgctaactctccaagtctcaccgagtccactttgccctgattcttgaggaactctttataatctggtccacatagtcttcatacctgtgaagatgttcagagagctccatct

SEQ ID NO: 18869 - DNA, 119 bp, homo sapiens
cttacctgggatctaactccttagctacacgcttcgccttgttccactcctcaccctcgatgaaagcatgattgcttccttgacaaggtccagattcagatagagctctgcagcctgca

SEQ ID NO: 18870 - DNA, 119 bp, homo sapiens
atcctacttactgcactgtgctttccaattccaatcagctggggtcctacagccagaacgacttccatatacgttggggaggcagaaacttgatggagagttcagctgcctgagtggtt

SEQ ID NO: 18871 - DNA, 119 bp, homo sapiens
catacctggcccccttcttagtagcttcccgctcatattcttcctgcagagcctccagctggctgggcaatagtccttgcagatgcgcagagcgtcactccataatccagcctcctgct

SEQ ID NO: 18872 - DNA, 119 bp, homo sapiens
gtattaaggaatgtatggggtaactcacatgaggactgcctccttgggtttaccagctctgatgaattcgcttcagcctcttcgaatttaccctacagggagagaaaggcagccgtgca

SEQ ID NO: 18873 - DNA, 119 bp, homo sapiens
atcacacccatacctcatcctccaggaacatagcatatttgagatgaacctcgggggttttgtgcttgaggccagccgagagagttcaaacgcaaattcaaaggagctgaaacagaaag

SEQ ID NO: 18874 - DNA, 119 bp, homo sapiens
accctgtaggcctcttcccaaagcccactggcccggtacatgttcactgttgccttccattcctgggcccgaggtagtggtactcagcctcctgtagtcggccttcagcctccagctcc

SEQ ID NO: 18875 - DNA, 119 bp, homo sapiens
ccacggctcacctttcagcctcacggtacttgccctgcttctccatttcctgggcctgagtgatgtatacactgacacatcttctggtctcatgcatttcatcgccagctgtggaggca

SEQ ID NO: 18876 - DNA, 119 bp, homo sapiens
tccacccatccctaccttgtgggcttgttcccaacgaccagcctgggtgtacatgtctatggcatctttgtccgatctcccttagtatagagctcctcagcaatctgtagttgatggga

SEQ ID NO: 18877 - DNA, 119 bp, homo sapiens
cttgctccactgcccctcacttcacacctaaatctcctttacattcccatactcccatacctggcttcgtgtagtgattaatggctgcatcaagctgcttctgctgcaccaggtggtcc

SEQ ID NO: 18878 - DNA, 119 bp, homo sapiens
ccccatgcctcctctagtttcaccacctccactgggaaggccaatcgagccagctctaccgctgccaggagagaaaagatgctcagcccagatttccagggatgggcctcaggaaaaag

SEQ ID NO: 18879 - DNA, 119 bp, homo sapiens
tggcttataggtggctagtacctttcatgaatgcgttgcctttacggtagcactccagggccttctgtgattgtgaatcttctcaaagagatcacctgcctgttaacacataccacatt

SEQ ID NO: 18880 - DNA, 119 bp, homo sapiens
tggagaagataaaacaggtaccttggcttcagccacagcgatacactcatcccaacggtgtagctcctgtacatgcccatggcctcctccacagcattctaggggaaacaggcagagca

SEQ ID NO: 18881 - DNA, 119 bp, homo sapiens
tcttttcctattacctgttccaaaaagatcatttcagccagtttgtagttcttttccagcatggctagagtgctcggacctgataaaagtctgttccttctccgccctgtgggggaaaa

SEQ ID NO: 18882 - DNA, 119 bp, homo sapiens
caggagcataatacttgcatattcccgggatacttgatctgcaatctcattggtctcatgcaggaatcggcttttgctacttggcccaaagcagaaaagcacctatggcatggaagcaa

SEQ ID NO: 18883 - DNA, 119 bp, homo sapiens
cctcacctctccgcaatgtgtagttgccttgcctctagtgccagtttactcaaggttttccacattgccctgtttctggggtcatttccagagtctctaagaaggctgttgccctggaa

SEQ ID NO: 18884 - DNA, 119 bp, homo sapiens
tcacacgaagtttccggtccctgaagaggagcttgtgtccagtctcattaagttccagccaatccacacgctctcatggctgacggtgccaatgttgtagccaccaatcagatccacta

SEQ ID NO: 18885 - DNA, 119 bp, homo sapiens
gagagagtcttactcacctatagcaatagtcttaatatcaataagataagccaatttcttattatcttcgttcctcgctgacacctctcattaatacgaacactgaaacatgaagggtg

SEQ ID NO: 18886 - DNA, 119 bp, homo sapiens
gaggttacctgatgaggtgggggttcatgaattcagtgcgtacagaacccagggtgtcattattcccatttccaccagggttagctctccggcattgaagatcatgcatacctgggaaa

SEQ ID NO: 18887 - DNA, 119 bp, homo sapiens
caagatggtgatggtgaatcaagctctactcacattctcattttcaaagaaatacttctcattgccaccgatccttgccaggctatctgtaacgggagaagacttaagaagcaatgtgg

SEQ ID NO: 18888 - DNA, 119 bp, homo sapiens
catcctgcttacctggctaggtcccacatacgtcaactcaaacttgttcttgtaaatactccttcggagcagcagtcaaactgttccaccccaccacatagtgtgccctagaagggaaa

SEQ ID NO: 18889 - DNA, 119 bp, homo sapiens
cattctttattcatacctgtgactctccagagccttcatcatcaaagaaatacctaacgatggtaccattgcatgaccagagagaattcctttcccagagcaactaaaaaaggagaaag

SEQ ID NO: 18890 - DNA, 119 bp, homo sapiens
tactactcctctttactcactttgttgtcagggacaccacgtaagactctgtcccatagatggtagatgtttattagttttggtgtttgctaaacgaacctgaaaatggaaaaattgat

SEQ ID NO: 18891 - DNA, 119 bp, homo sapiens
ctcttgtgtttcccttccctcttttaccttcccttcagccagtccaaagacaatgatgtattctgccggcattgcagacaagtgacagcactctgcgtggaaggaaacaatgaaaagga

SEQ ID NO: 18892 - DNA, 119 bp, homo sapiens
ttgttcatcctaaggttccagggactggtctgaactttaccgtctggatgaacttgttgcagatgacttcttgtcacccctgccaaacaaaagaaggggaaacatattaaaaaccactt

SEQ ID NO: 18893 - DNA, 119 bp, homo sapiens
tcaccaatcttctccaatcttgtagacatagatgatgttgtcagtctgtcctatggcaattttagtggatcaggagaaaaagccatgcccttcaccatatagctcttcctgccatacta

SEQ ID NO: 18894 - DNA, 119 bp, homo sapiens
cacgcaattcctcacctgagggctcagcagggtcctcaggtgcttcaagtgcatgacgcacacctgtcttcagatgctcctagacagcgacaactcccgtggttacctggacaacccgc

SEQ ID NO: 18895 - DNA, 119 bp, homo sapiens
gcgcttgtcaacttacagagctttctcctggaacttagcccagcttcttggaaaagtcaccaaagggtggtagggtacaacttgatggattttctctgccttccctagaaaatgagagt

SEQ ID NO: 18896 - DNA, 119 bp, homo sapiens
gagaatggtttagagaaaaccactcctacagctgtctcagcataacgcagtagcagtaatatgttctgtaatggttcagacttaccatcttccctgggtcttggttcctcatctgtaaa

SEQ ID NO: 18897 - DNA, 119 bp, homo sapiens
tggttcctcatctgtaaaagtgggctgacttacagcaagagcctagaaaattatacaattacacaaattaacaatgctactattgttactattaacaaaccagtgctgcaatgagctga

SEQ ID NO: 18898 - DNA, 119 bp, homo sapiens
atgaacaaaattttcactatctacacccaactttaaagaaaattgtgaattaactcttaagatatttactctcacacaattcatcactgctattcatacctaaaaaaaaaatcattatt

SEQ ID NO: 18899 - DNA, 119 bp, homo sapiens
cgactgtagctttgatcatttccttaggcttttcagttattggtatagttttcaaacaatcttgatcttgttccaaaggaaaagctctcctgtagttagtaccccagccagccaggcat

SEQ ID NO: 18900 - DNA, 119 bp, homo sapiens
accttgatcccagcatcccacagttctgagacaagctttagtctttcctctagcagcttcttctgtgcaatgccacaagcacctgtgtctccgtggtccgtatcttctcctccaaagcc

SEQ ID NO: 18901 - DNA, 119 bp, homo sapiens
ctttagttcaaatacaggtgtatcaatgacttctgcaccgtggcgcttgaagcaacggatgattacgtcaacaccttctcgcgaactgccatctgccggggactatagtctcttgtgcc

SEQ ID NO: 18902 - DNA, 119 bp, homo sapiens
gagagggaaggagccacacagtgccatcaggggctccgagatcttggaaacacaaatcaccttttttccggcttgtgagatgaggtcagctgcactcttgctcatgacctttgtgacgt

SEQ ID NO: 18903 - DNA, 119 bp, homo sapiens
agagagggcaattggtttggctggcaatggtgatggcacggaacacagcctcagcttccagctgcaagaaaagtctccaggagtcaatagaaacatgaacctctcaaactggtggctcc

SEQ ID NO: 18904 - DNA, 119 bp, homo sapiens
gtgcaccttcatcccctgtaacttacctcttctggcctgctcagtacatggccttctgggccagttatcccatttccaacatgcgggtttgctcctgaaatgaaaaaagaaaatagttc

SEQ ID NO: 18905 - DNA, 119 bp, homo sapiens
agggagctgcacggtgttacctgggcaatgatatccccattctcagcatgaacttgagcaatggcccccgctctcccaggcaggtgaagatctcatagagctgaaatagaaatgagtct

SEQ ID NO: 18906 - DNA, 119 bp, homo sapiens
cccaaaccacatagcaaatgggttgttacctctgtgttagatacttgatacaaatccttataagccataaaaccatgaaggagttaacccctgcaaaagagggacaggaggaaaaacaa

SEQ ID NO: 18907 - DNA, 119 bp, homo sapiens
aattccatatacatactttattaagccatcttccatgtaaatatcagcataaaaggactgatcatcattacgattctgcctcccttgataaggagacggtcactctagaaaagaaggaa

SEQ ID NO: 18908 - DNA, 119 bp, homo sapiens
cacctccggaaagcatgaagaggttttcaaatccacgctcgcacatggtggtggccgcctgactggccacctttcatcatcgtcatacagaatgatgatcttgccatgggcatttttct

SEQ ID NO: 18909 - DNA, 119 bp, homo sapiens
acctgtttctttggaaagccttcattaactttggttcccatggcagcaattcatttaaaagacgtatcatgtactatgtaattcttttacagcttgcctccgatgataccattttccct

SEQ ID NO: 18910 - DNA, 119 bp, homo sapiens
tggatcaacacctaccgatttttttctactgttttccagatctttgagttcattctcgatttttgtgataattccctgagttcatcaagattagtgcaaataagctaaaataaaacaca

SEQ ID NO: 18911 - DNA, 119 bp, homo sapiens
gacaaagttgaaacatttacctgaaactctggtacagtaggtgactttatgacagttttcctcttcttttgattgcttttttagagacggatttttttcctttcaagattaaaagagaa

SEQ ID NO: 18912 - DNA, 119 bp, homo sapiens
ctgacctgggacacagggtctgtgtgggtgtcatccgtcaggcctgtgcgccacagcagcgggtcctcagacggctcaggtcccacaccaacacctcaccactgtacagccctcctgca

SEQ ID NO: 18913 - DNA, 119 bp, homo sapiens
ctcaccggccgtaggcacaggccaccacagagccagtggagttccaggagatgctggtcacatgcagacctgcgcttgggctggcgggtagcccagggtatacagacaagacacctgcg

SEQ ID NO: 18914 - DNA, 119 bp, homo sapiens; identical to SEQ ID NO: 16369

SEQ ID NO: 18915 - DNA, 119 bp, homo sapiens; identical to SEQ ID NO: 16370

SEQ ID NO: 18916 - DNA, 119 bp, homo sapiens; identical to SEQ ID NO: 16371

SEQ ID NO: 18917 - DNA, 119 bp, homo sapiens; identical to SEQ ID NO: 16372

SEQ ID NO: 18918 - DNA, 119 bp, homo sapiens; identical to SEQ ID NO: 16373

SEQ ID NO: 18919 - DNA, 119 bp, homo sapiens
gaaccagaagctccaggaagaaaaacataaaagcataactgaggcacttaggagacaggagcagaatataagagttttgaggagacctatgaccgaaagctcaagaatgaacttctaaa

SEQ ID NO: 18920 - DNA, 119 bp, homo sapiens; identical to SEQ ID NO: 16376

SEQ ID NO: 18921 - DNA, 119 bp, homo sapiens; identical to SEQ ID NO: 16377

SEQ ID NO: 18922 - DNA, 119 bp, homo sapiens
tcagattgagcattctgcacagctgaaggcccagattctaggttacaaagcttctgtaaagagtttaacactcaggttgccgatttaaaattgcaactgaagcaaactcagacaggtta

SEQ ID NO: 18923 - DNA, 119 bp, homo sapiens; identical to SEQ ID NO: 16380

SEQ ID NO: 18924 - DNA, 119 bp, homo sapiens
tgcagctgcagggaacatgccaaggcagttggaaatgggcgggctttctcctgccggggatatgtctcagtggacgctgctgcagctgctgtgcccctctcatatcagcacccaagtaa

SEQ ID NO: 18925 - DNA, 119 bp, homo sapiens; identical to SEQ ID NO: 16383

SEQ ID NO: 18926 - DNA, 119 bp, homo sapiens
taagttgatcatggtcttgcatctttcttttttagagtcgacttcaatgttcctatgaagaacaaccagtaacaaacaaccagaggtaaggtccctgctaatccttgggctgggtttaa

SEQ ID NO: 18927 - DNA, 119 bp, homo sapiens
ctctataggttaaagccgagccagccaaaatagaagctttccgagcttcactttccaagctaggggatgctatgtcaatgatgcttttggcactgctcacagagcccacaggtaccaag

SEQ ID NO: 18928 - DNA, 119 bp, homo sapiens
ctccatggtaggagtcaatctgccacagaaggctggtgggtttttgatgaagaaggagctgaactacttgcaaaggccttggagagcccagagcgacccttcctggccatcctgggcgg

SEQ ID NO: 18929 - DNA, 119 bp, homo sapiens
tagagctaaagttgcagacaagatccagctcatcaataatatgctggacaaagtcaatgagatgattatggtggtggaatggcttttaccttccttaaggtgctcaacaacatggaggt

SEQ ID NO: 18930 - DNA, 119 bp, homo sapiens
tcattcaacaggtggtggagacactgccacttgctgtgccaaatggaacacggaggataaagtcagccagtgagcactgggggtggtgccagtttggagctcctggaaggtgagggtct

SEQ ID NO: 18931 - DNA, 119 bp, homo sapiens
ccaccccacggccgcgcccctcggcctcccaatgggctgtgcggctgccagcgcttgcgccggacgccattccggtccccgtggtcacgtgaccgtcacttcacgtgaccgcgcggcgg

SEQ ID NO: 18932 - DNA, 119 bp, homo sapiens
cggacgccacttccggtccccgtggtcacgtgaccgtcacttcacgtgaccgcgcggcggccgctgcgggcgatggcggcggggctggcgcggctcctgttgctcctcgggctctcggc

SEQ ID NO: 18933 - DNA, 119 bp, homo sapiens
ccgctgcggcgcgatggcggcggggctggcgcggctcctgttgctcctcgggctctcggccggcggtgatggcccggccgtccgcgtccccaggccccgcgcgcgctctgcaccccggc

SEQ ID NO: 18934 - DNA, 119 bp, homo sapiens
cttcgggctcggccggcccctcctcctctccctccggcctcccaagggaggcaggcggtggagagctcgtggagaccccgggggctcggggggcgtccggggcgcgggtgggtcggtgg

SEQ ID NO: 18935 - DNA, 119 bp, homo sapiens
gagagctcggtggagaccccgggggctcggggggcgtccggggcgcgggtgggtcggtggcggcctccttgggtgcgtgtgctggtctggggcggcggagccttcctctcccttgacgt

SEQ ID NO: 18936 - DNA, 119 bp, homo sapiens
cggcctcctttgggtgcgtgtgctggtctggggcggcggagccttcctctcccttgacgtcttgcgagccttggcctggaatccagaaagggtgactcgtgaggcacagactctcggag

SEQ ID NO: 18937 - DNA, 119 bp, homo sapiens
ctggtgggaggcgctgcattgagggtggctcacctggcagggtccctggttggtggcagggaggaggtcgggcctgggagccgggctggggctctggagctggtgcctccttgggttcc

SEQ ID NO: 18938 - DNA, 119 bp, homo sapiens
gaggaggtctgggcctgggagccgggctggggctctggagctggtgcctccttgggttcctccttgggcgcagggggatgggtgtgggcagggagggggtctcccgggcctgcagcttg

SEQ ID NO: 18939 - DNA, 119 bp, homo sapiens
tccttgggctgcagggggatgggtgtgggcagggagggggtctcccgggcctgcagcttgggccccattcctgggggcgtcctggaggcgctaagcagcggggaaagcaggagctagag

SEQ ID NO: 18940 - DNA, 119 bp, homo sapiens
agtcccggaaggcccgtgaggaccctgcggtgtggggagtgcagggccgggcacgcctggacccagcctcttcactctctgccctcgggcgcaggtttgctggctgcagtgcgcggcct

SEQ ID NO: 18941 - DNA, 119 bp, homo sapiens
acccagcctccttcactctctgccctcgggcgcaggtttgctggctgcagtgcgcggcctccgagccgtccgggcggtcttcagggaggctgaagtgaccttggaggcgggaggcgcgg

SEQ ID NO: 18942 - DNA, 119 bp, homo sapiens
ccgagccgtgccgggcggtcttcagggaggctgaagtgaccttggaggcgggaggcgcggagcaggagccggccaggcgctggggaaaggtaagatcctcagggtggaaccgcagggta

SEQ ID NO: 18943 - DNA, 119 bp, homo sapiens
agcaggagcccggccaggcgctggggaaaggtaagatcctcagggtggaaccgcagggtaggggccgcagtgaccattttggtgtggaccgcgcgaggggtgttcgggccggggcaagg

SEQ ID NO: 18944 - DNA, 119 bp, homo sapiens
tgggggtcctgggcccctgggcttgcgaccccatcttctctcgggctcgcccggacctggccgcccgccggccgccgcccgcctgaaccgcgaccccggcctggcaggcggtccccgct

SEQ ID NO: 18945 - DNA, 119 bp, homo sapiens
ccgcccgcctggccgccgcccgcctgaaccgcgaccccggcctggcaggcggtccccgcttcgaggtaggctgctgcccgagccttgccggacgccgggctcgctgggggccgtgtcct

SEQ ID NO: 18946 - DNA, 119 bp, homo sapiens
tcgaggtagcgctgctgcccgagccttgccggacgccgggctcgctgggggccgtgtcctccgcgctggccgcgtgtcgggcctcgtgggtccggtgaaccctgcggcctgccggccag

SEQ ID NO: 18947 - DNA, 119 bp, homo sapiens
ccgcgctggcccgcgtgtcgggcctcgtgggtccggtgaaccctgcggcctgccggccagccgagctgccgccgaagaagccgggatcgcgctggtgccctggggctgcccctggacgc

SEQ ID NO: 18948 - DNA, 119 bp, homo sapiens
tgggagtctttccccagcggcgcctcagccccttccccatccccagaccagctgtggacagccccggagtgcttagggacccagccctggagcgccggggaacgctggccggcgacgtc

SEQ ID NO: 18949 - DNA, 119 bp, homo sapiens
gccccggagctgcttagggacccagccctggagcgccggggaacgctggccggcgacgtctttagcttgccatcatcatgcaagaagtagtgtgccgcagtgccccttatgccatgctg

SEQ ID NO: 18950 - DNA, 119 bp, homo sapiens
tttagcttggccatcatcatgcaagaagtagtgtgccgcagtgccccttatgccatgctggagctcactccgagggtaaggctgccctgtgcgtggagttcggcccacaggggcaccct

SEQ ID NO: 18951 - DNA, 119 bp, homo sapiens
ggtggagcgaggcgcggagctgggtgcgcgccgagcctctgcctcccgccgcctcctcgccctccattctcgctccccgtcttctcccggccacaccgccactgctgccgcctccctgg

SEQ ID NO: 18952 - DNA, 119 bp, homo sapiens
cctccattcctcgctccccgtcttctcccggccacaccgccactgctgccgcctccctgggaacagtagcgggggagggggactggcgcggtcagagcctgcgaggaggtgcggggcgc

SEQ ID NO: 18953 - DNA, 119 bp, homo sapiens
gaacagtagccgggggagggggactggcgcggtcagagcctgcgaggaggtgcggggcgccggggcgtagggagcgcgccgggccctgcccgagatcagataacagccggcgggggagg

SEQ ID NO: 18954 - DNA, 119 bp, homo sapiens
cggggcgtaggggagcgcgccgggccctgcccgagatcagataacagccggcgggggagggggtgggccgccgtgctcacagccggaccgagggaccgacgccagccgccccggcccaa

SEQ ID NO: 18955 - DNA, 119 bp, homo sapiens
agggcgatccgctttgcagagaagacgcgcccctcggcatggagcgcccccgggagctgccctgaggcgtggcggcagcggcggcgatgcagccagcgcggcagctgccggggccagga

SEQ ID NO: 18956 - DNA, 119 bp, homo sapiens
cctgaggcggtggcggcagcggcggcgatgcagccagcgcggcagctgccggggccaggaacggccgccggagcttggaggacgccgagcgcgccgcgcccgggccactgaccgaggta

SEQ ID NO: 18957 - DNA, 119 bp, homo sapiens
gagcaaaggcatgaggcccgaaggacgcttgcagccccgggcccgggcccaggaggcgggggaggcctgcacggccggcggtccggggcccaaccagggctccaggggcagcgacatgg

SEQ ID NO: 18958 - DNA, 119 bp, homo sapiens
ggaggcctggcacggccggcggtccggggcccaaccagggctccaggggcagcgacatggccggggggcggcgaacggcagcgctggggcctcggggagtctcggagctgccacggcac

SEQ ID NO: 18959 - DNA, 119 bp, homo sapiens
ccggggggcgggcgaacggcagcgctggggcctcggggagtctcggagctgccacggcacccgagcctgctccagccgctcctggcggcgccacttggcccggcggttctggaaccaca

SEQ ID NO: 18960 - DNA, 119 bp, homo sapiens
ctcccactgtgcgacaccctcccgccctctcggccgcagggcgctgatggacgagaccatgaaggagttaaggcctacaaatcggaactggaggaacaactgaccccggtggcggagga

SEQ ID NO: 18961 - DNA, 119 bp, homo sapiens
gaaggagttgaaggcctacaaatcggaactggaggaacaactgaccccggtggcggaggagacgcgggccggctgtccaaggagctgcaggcggcgcaggcccggctgggcgcggacat

SEQ ID NO: 18962 - DNA, 119 bp, homo sapiens
gacgcgggcacggctgtccaaggagctgcaggcggcgcaggcccggctgggcgcggacatggaggacgttgcggccgcctggtgcagtaccgcggcgaggtgcaggccatgctcggcca

SEQ ID NO: 18963 - DNA, 119 bp, homo sapiens
ggcagcgactgctgctgcggatgggagggggccggctcggcgcgcccatggagcgccacggcagggcttcgccacctccgtctcgtcggctggggagcaggcggccggggaccccgaag

SEQ ID NO: 18964 - DNA, 119 bp, homo sapiens
gcagggcttccgccacctccgtctcgtcggctggggagcaggcggccggggaccccgaagggcggcggcggagccactgcggcgccgggcgagcagcgcgtcggtgcccgcggtcgggg

SEQ ID NO: 18965 - DNA, 119 bp, homo sapiens
ggcggcggcaggagccactgcggcgccgggcgagcagcgcgtcggtgcccgcggtcggggcctcggctggggcacgaggcgggatcgactgggctcttacagcggccccacctcggtct

SEQ ID NO: 18966 - DNA, 119 bp, homo sapiens
cctcggctgagggcacgaggcgggatcgactgggctcttacagcggccccacctcggtctcccgccagccgtcgaaagcctgaggaaaaagcggccgcgtaagtgttccgtggggcgcc

SEQ ID NO: 18967 - DNA, 119 bp, homo sapiens
gcagccgctcgggcgcaggggcgaggagtcgggcgctcgagggctgccgagcctgctcgcggggctcaacgcccagggcgccgcgaggggagggagaggacggctgggagggaggcccg

SEQ ID NO: 18968 - DNA, 119 bp, homo sapiens
ggggctcaaccgcccagggcgccgcgaggggagggagaggacggctgggagggaggcccggagaagggccctaccttggctcgcagggcacagagcagggcgagcaggaggcttagggg

SEQ ID NO: 18969 - DNA, 119 bp, homo sapiens
ccccccccccccccgctccgcgcgaagcctcacctgcccagcgcccgcttcattcccgcgtcggctgcgagcgcggctcagccgccgccgggcccgtcaggcgtaggttctgcttcagg

SEQ ID NO: 18970 - DNA, 119 bp, homo sapiens
tcggctgcgcagcgcggctcagccgccgccgggcccgtcaggcgtaggttctgcttcaggcggcagtcgcgtccagcgccgcggcggccgagccggaggaggacgagcccgcggcggcg

SEQ ID NO: 18971 - DNA, 119 bp, homo sapiens
cggcagtcggcgtccagcgccgcggcggccgagccggaggaggacgagcccgcggcggcgcagcgctcagctccaaggcgacgggctcggtccgcttcctcatcccgcggccgacaggg

SEQ ID NO: 18972 - DNA, 119 bp, homo sapiens
cagcgctcatgctccaaggcgacgggctcggtccgcttcctcatcccgcggccgacagggccagccgccacggcgcccgctggcctgcgccgcagtgccgccgctcacagccgccgcca

SEQ ID NO: 18973 - DNA, 119 bp, homo sapiens
ccagccgccgacggcgcccgctggcctgcgccgcagtgccgccgctcacagccgccgccacccagagccggagcccggaacccgccgctcctcacatcccagcccaggccgctgcgccg

SEQ ID NO: 18974 - DNA, 119 bp, homo sapiens
cccagagcccggagcccggaacccgccgctcctcacatcccagcccaggccgctgcgccggctacgaacagcggcgggggcccgccagccaggccggccaatcagcgccgggctcccgc

SEQ ID NO: 18975 - DNA, 119 bp, homo sapiens
gctacgaaccagcggcgggggcccgccagccaggccggccaatcagcgccgggctcccgccggctctgcctacccccctcccccggccccgccccggccacctcctctctagttccaag

SEQ ID NO: 18976 - DNA, 119 bp, homo sapiens
cggctctgccctacccccctcccccggccccgccccggccacctcctctctagttccaaggagcgcgcgccagcatccctggcgccacccgcagccattttgtgggagggtgggcgaag

SEQ ID NO: 18977 - DNA, 119 bp, homo sapiens
aggatctgaacgatccgggggcggccccgccccgttaccccttgcccccggccccgccccctttttggaggccgatgaggtaatgcggctctgccattggtctgagggggcgggcccca

SEQ ID NO: 18978 - DNA, 119 bp, homo sapiens
ctttttggagggccgatgaggtaatgcggctctgccattggtctgagggggcgggccccaacagcccgagcggggtccccgggggcccagcgctatatcactcggccgcccaggcagcg

SEQ ID NO: 18979 - DNA, 119 bp, homo sapiens
acagcccgaggcggggtccccgggggcccagcgctatatcactcggccgcccaggcagcggcgcagagcggcagcaggcaggcggcgggcgctcagacggcttctcctcctcctcttgc

SEQ ID NO: 18980 - DNA, 119 bp, homo sapiens
tcctccagctcctgctccttcgccgggaggccgcccgccgagtcctgcgccagcgccgaggcagcctcgtgcgccccatcccgtcccgccgggcactcggagggcagcgcgccggaggc

SEQ ID NO: 18981 - DNA, 119 bp, homo sapiens
gcagcctcgctgcgccccatcccgtcccgccgggcactcggagggcagcgcgccggaggccaaggttgcccgcacggcccggcgggcgagcgagctcgggctgcagcagccccgccggc

SEQ ID NO: 18982 - DNA, 119 bp, homo sapiens
caaggttgccccgcacggcccggcgggcgagcgagctcgggctgcagcagccccgccggcggcgcgcacgcaactttggagaggcgagcagcagccccggcagcggcggcagcagcggc

SEQ ID NO: 18983 - DNA, 119 bp, homo sapiens
acaaaattcataaatttaaattcataaatttagctgaaagatactgattcaatttgtatacagtgaataaaatgagacgacagcaaaattttcatgaaatgtaaaatatttttatagtt

SEQ ID NO: 18984 - DNA, 119 bp, homo sapiens
tagctgtttacccgccacctctcgaggccgacgcgcccctcgccgctcaccaggtggccctcctccagcgagcccccgagtcagtcctcatggtgctctccccgcggggctgccccggc

SEQ ID NO: 18985 - DNA, 119 bp, homo sapiens
tcctccagccgagcccccgagtcagtcctcatggtgctctccccgcggggctgccccggcgcaaccgccgcggcccgagcccagctccccgcgacgcagcggcctccgggacctgtggg

SEQ ID NO: 18986 - DNA, 119 bp, homo sapiens
gcaaccgccggcggcccgagcccagctccccgcgacgcagcggcctccgggacctgtgggacgccggggttcgtggcgcctggcgaggcagccgccccctgagccaggtccccgcccgc

SEQ ID NO: 18987 - DNA, 119 bp, homo sapiens
gcccccgccccttgccgggccccacccctgcagacctgcttgccgtcccgccggtgcttcacaagcgtccctctccatagctccccttgcccacgacccgcaggtagcagtaggcggcc

SEQ ID NO: 18988 - DNA, 119 bp, homo sapiens
acaagcgtcacctctccatagctccccttgcccacgacccgcaggtagcagtaggcggccaggggcatgtcccagcgctggcccagagtcgggatgcggcggcagcggcgggtagggca

SEQ ID NO: 18989 - DNA, 119 bp, homo sapiens
aggggcatgttcccagcgctggcccagagtcgggatgcggcggcagcggcgggtagggcagcgggcggcacaagaagctcggttcatgcccgagagggggcagtgggggcggctgttga

SEQ ID NO: 18990 - DNA, 119 bp, homo sapiens
gcgggcggcaacaagaagctcggttcatgcccgagagggggcagtgggggcggctgttgaggcagccggcccgggcgggattgctggggcccggcccgcgacgacgccgctgccatagc

SEQ ID NO: 18991 - DNA, 119 bp, homo sapiens
ggcagccgggcccgggcgggattgctggggcccggcccgcgacgacgccgctgccatagcgatccgggcgggagcagttctgcgcatgctcctgcgtccccaaaggacggccatagagc

SEQ ID NO: 18992 - DNA, 119 bp, homo sapiens
atatctctgttttaggagttcacatatagttcagcatttattgtttaggagtataattttattttatctaaataatagtctattttttcttttgtattttgttataatcttaagcaaca

SEQ ID NO: 18993 - DNA, 119 bp, homo sapiens
attttatctaaaataatagtctattttttcttttgtattttgttataatcttaagcaacaaagaaaaaacctaatatttgaatctatttatgtctttcaatttaaattcacttcagttt

SEQ ID NO: 18994 - DNA, 119 bp, homo sapiens
aagaaaaaaccctaatatttgaatctatttatgtctttcaatttaaattcacttcagtttttgttattgaatatatttacttttacatggttataatcactttatatttttaatgtttt

SEQ ID NO: 18995 - DNA, 119 bp, homo sapiens
cagggggtggaacttcagagggcctggcagggagagagctgggctaggacaccgcagcggaggagaggggctggcaccatgcggtagaagacccagcggccgccgcgagtgtgaggagg

SEQ ID NO: 18996 - DNA, 119 bp, homo sapiens
aggagagggagctggcaccatgcggtagaagacccagcggccgccgcgagtgtgaggaggcagggcctgtggggcctgggtctgggccttgaccaaggaggcagagaaaggtggcccaa

SEQ ID NO: 18997 - DNA, 119 bp, homo sapiens
cagggcctggtggggcctgggtctgggccttgaccaaggaggcagagaaaggtggcccaaggagggcccggggtgagtctgagcctggtggcagcgctgacccagcaaccaggggcctg

SEQ ID NO: 18998 - DNA, 119 bp, homo sapiens
ggcgcagcctccgggcctccagtgcaatcactacgccctggggcccggaaaccgttttccggtctttcgtttcggctggggcgtggaggccgcggtgctgcgtaggccgggccgggcgc

SEQ ID NO: 18999 - DNA, 119 bp, homo sapiens
ggtctttcgctttcggctggggcgtggaggccgcggtgctgcgtaggccgggccgggcgcaggaacagcccgtggcgccctctctggccgccgcccgggcgggaaacgtcgttccgggg

SEQ ID NO: 19000 - DNA, 119 bp, homo sapiens
gccggcaccgcctcgcaccacgcccccgcgggcccgcactttcccggagtgcaccccgcggccgccagcggggcgatggcggggctctggctggggctcgtgtggcagaagctgctgct

SEQ ID NO: 19001 - DNA, 119 bp, homo sapiens
acgctggcgtaagaggcggcggtggaggcgctacgctggcgtaagaggcggcggtggaggcgctacgctgcgtaagaggtggcggtggagacgtttcgctggcgtaagaggtggaggtg

SEQ ID NO: 19002 - DNA, 119 bp, homo sapiens
cgctacgctggcgtaagaggtggcggtggagacgtttcgctggcgtaagaggtggaggtggagacgttagctggcgtaagaggtggaggtggagcgtccttactgcacagggtgtggag

SEQ ID NO: 19003 - DNA, 119 bp, homo sapiens
gagacgttacgctggcgtaagaggtggaggtggagcgtccttactgcacagggtgtggagggaatggcggggctcagctggctttgtcatcggacacgccgcaggctcagtttctgcct

SEQ ID NO: 19004 - DNA, 119 bp, homo sapiens
ggcgcgagaaggctaggcgaggccgactgcgcggggtgaagacgccaggccgacagctgcgggccctacgccagccctgacgcgagcctgcgtcctggcgacggcggagggcgggcagg

SEQ ID NO: 19005 - DNA, 119 bp, homo sapiens
gggccctaccgccagccctgacgcgagcctgcgtcctggcgacggcggagggcgggcagggggcgcggggctgccacggcgcctgctcagaaccggccgggaacgccgcgggcgggtct

SEQ ID NO: 19006 - DNA, 119 bp, homo sapiens
gggcgcgggcgctgccacggcgcctgctcagaaccggccgggaacgccgcgggcgggtctccccggtccccgcccctccagccctgctctcaggcctccgcccgggccctctaagctgc

SEQ ID NO: 19007 - DNA, 119 bp, homo sapiens
gccccgcggccctcaccgcaaacaggcgcagcacgttggcgaccatgatggagacggagctggccgagggcccacgacggccacgacgcgctcggggggcgcggggcgcagcggaggga

SEQ ID NO: 19008 - DNA, 119 bp, homo sapiens
tggccgaggcgcccacgacggccacgacgcgctcggggggcgcggggcgcagcggagggacgcctcccggcagcgcacgcccacctcgtcgccgtcgccgcggccgcggatcagcgcct

SEQ ID NO: 19009 - DNA, 119 bp, homo sapiens
cgcctcccgggcagcgcacgcccacctcgtcgccgtcgccgcggccgcggatcagcgcctgcacgaagccagcgcctgctccagcgcgtaggtgtcccgcgagcaggtgtccagcagcc

SEQ ID NO: 19010 - DNA, 119 bp, homo sapiens
gcacgaagctcagcgcctgctccagcgcgtaggtgtcccgcgagcaggtgtccagcagccgcgcgcccagcgcacgccgggcagcagctcggggtcggcgttgacgcggtccagcgcgt

SEQ ID NO: 19011 - DNA, 119 bp, homo sapiens
gcgcgcccaggcgcacgccgggcagcagctcggggtcggcgttgacgcggtccagcgcgtacagcatggctccagccggtgcacgccctgctccttcttcagctgcccgcacgcccggc

SEQ ID NO: 19012 - DNA, 119 bp, homo sapiens
gcccgccgcgccccgcgcgtgcaccgggaacaggccgcccagcgtcaggccgcccgccaggcgcacagacccgccgcgcgcgccaggcccgcctgcgccagccacgccagcggcagcag

SEQ ID NO: 19013 - DNA, 119 bp, homo sapiens
gcgcacagagcccgccgcgcgcgccaggcccgcctgcgccagccacgccagcggcagcagcgccacgagagcggctcccgggctctccggggccgcgccatcggctcgtctagcgggct

SEQ ID NO: 19014 - DNA, 119 bp, homo sapiens
cgccacgagcagcggctcccgggctctccggggccgcgccatcggctcgtctagcgggctgcggggagaagaggggcggggagcgctctgagggcgggggaaggagagcgcgggctcgg

SEQ ID NO: 19015 - DNA, 119 bp, homo sapiens
gcggggagacagaggggcggggagcgctctgagggcgggggaaggagagcgcgggctcggggcgcgggggggacaccggggtcctggggagaaggcgctcggggcgcgccttccacttc

SEQ ID NO: 19016 - DNA, 119 bp, homo sapiens
ggcgcggggagggacaccggggtcctggggagaaggcgctcggggcgcgccttccacttcggctctgggagttagctcagccggcctgcccgggcctccgtctcgctcttacaagcgcc

SEQ ID NO: 19017 - DNA, 119 bp, homo sapiens
ggccgcgtcctcgcgcgcggggatcgcacccccgctggcgctcggcgcctactcgcccggccagagctcctctacagctccccctgcagccagacctccagcgcgggcagctcgggcgg

SEQ ID NO: 19018 - DNA, 119 bp, homo sapiens
gttcccacggctctaggtctggcagactcggctccctcctgccctcagaacgtgaatatctcgggtggcccttcaccctcagccatggctgggctcctgggagccttctcacctactcc

SEQ ID NO: 19019 - DNA, 119 bp, homo sapiens
tcgggtggcaccttcaccctcagccatggctgggctcctgggagccttctcacctactcctgcccccaggcctgtacccatccccagcatcacggctgtgcaagagcagcggacagtgg

SEQ ID NO: 19020 - DNA, 119 bp, homo sapiens
tgcccccagggcctgtacccatccccagcatcacggctgtgcaagagcagcggacagtggcagaccccagagccacccggtctctgtctaaggcggtctgcaaacgtgaggctccctgt

SEQ ID NO: 19021 - DNA, 119 bp, homo sapiens
cagaggtaaaagcggccatgggccagacatactgcaatctctgaaaatcacctgttcccctgcagcccagagccaagagacctgccggggggccctcatctccgaccaatgggtcctga

SEQ ID NO: 19022 - DNA, 119 bp, homo sapiens
tgcagcccaagagccaagagacctgccggggggccctcatctccgaccaatgggtcctgacagcagctcttgcttccgcgatggcaacgaccactccctgtggagggtcaatgtgggta

SEQ ID NO: 19023 - DNA, 119 bp, homo sapiens
cagcagctcattgcttccgcgatggcaacgaccactccctgtggagggtcaatgtgggtaaggcaggggtgcaccagcctcctgatcctgaagccacagatcctaccacctcacccagc

SEQ ID NO: 19024 - DNA, 119 bp, homo sapiens
gtgccctgcagggaagagtgctctggagatccctggaagagatactggggacaggctggtgtgacccttctcttctccccaggcccatctgccttccctgcacgatggaggccaatctg

SEQ ID NO: 19025 - DNA, 119 bp, homo sapiens
gtgacccttgctcttctccccaggcccatctgccttccctgcacgatggaggccaatctggctctgcgggacctcaaggcagcacctgtagggaccatggtgagtgctgggacttatgg

SEQ ID NO: 19026 - DNA, 119 bp, homo sapiens
gctctgcggagacctcaaggcagcacctgtagggaccatggtgagtgctgggacttatggtgcttgagactggggccggggtttgggggtgataacaaggactaggctgcagtccccaa

SEQ ID NO: 19027 - DNA, 119 bp, homo sapiens
gggacttctgcagtttctgtttccttgactggcagctcagcggggccctcccgcttggatgttccgggaagtgatgtgggtaggacaggcggggcgagccgcaggtgccagaacacaga

SEQ ID NO: 19028 - DNA, 119 bp, homo sapiens
gttccgggaaagtgatgtgggtaggacaggcggggcgagccgcaggtgccagaacacagattgtataaaggctgggggctggtggggagcaggggaagggaatgtgaccaggtctaggt

SEQ ID NO: 19029 - DNA, 119 bp, homo sapiens
ttgtataaaaggctgggggctggtggggagcaggggaagggaatgtgaccaggtctaggtctggagtttagcttggacactgagccaagcagacaagcaaagcaagccaggacacacca

SEQ ID NO: 19030 - DNA, 119 bp, homo sapiens
gacttctacttgtccccccttctcaaagcaatccactgtccaagaccacacgacttcgagaacggggaaactggccccggtctccctactacaatgtgagtgatgagatctctttccac

SEQ ID NO: 19031 - DNA, 119 bp, homo sapiens
aacggggaatactggccccggtctccctactacaatgtgagtgatgagatctctttccactgctatgacgttacactctccggggctctgccaatcgcacctgccaagtgaatggccga

SEQ ID NO: 19032 - DNA, 119 bp, homo sapiens
tgctatgacggttacactctccggggctctgccaatcgcacctgccaagtgaatggccgatggagtgggagacagcgatctgtgacaacggaggtgagaagcatcccctccccctacat

SEQ ID NO: 19033 - DNA, 119 bp, homo sapiens
gttaaaagatggcttggaagaccaggtgaggtgatggtctcttccctctccacagaccacaagttgaagcagggactaacaccaagaaggccctccaggcagtgtacagcatgatgagc

SEQ ID NO: 19034 - DNA, 119 bp, homo sapiens
aagttgaagtcagggactaacaccaagaaggccctccaggcagtgtacagcatgatgagctggccagatacgtccctcctgaaggctggaaccgcacccgccatgtcatcatcctcatg

SEQ ID NO: 19035 - DNA, 119 bp, homo sapiens
tggccagatgacgtccctcctgaaggctggaaccgcacccgccatgtcatcatcctcatgactgatggtagaagggacctctctcctgtcccagcctccccaccttctcagaccagcat

SEQ ID NO: 19036 - DNA, 119 bp, homo sapiens
gggcgtcacctctcgggctcgtagccggcctgcagcagtcgggcgctgtaccgctgcgccgccgtctcggtcccgggtgttgccgggctccgggctccggaacagcggcggctccgcct

SEQ ID NO: 19037 - DNA, 119 bp, homo sapiens
gccgtctcgtgtcccgggtgttgccgggctccgggctccggaacagcggcggctccgcctccctgcagcgtggtggagtgagtggcccctccatgcggaggccgcagctcagggcgggc

SEQ ID NO: 19038 - DNA, 119 bp, homo sapiens
ccctgcagcggtggtggagtgagtggcccctccatgcggaggccgcagctcagggcgggcgggagcctgaggctcccggggccccggctgggcagtgagcgcagcccggtcgagtcccg

SEQ ID NO: 19039 - DNA, 119 bp, homo sapiens
gcactgccgagcgccctgggcacgcacgcttacccgccaggccaggtccagatcgaaatcccgggcgcgaggaaccgcagcaggaaggagtcggtgagcggcagcggcgcgagcgggac

SEQ ID NO: 19040 - DNA, 119 bp, homo sapiens
ccgggcgcgcaggaaccgcagcaggaaggagtcggtgagcggcagcggcgcgagcgggacgccagcttccgggcccggcgccgcagcgccgccaggcccggctgcagcaacggagagtg

SEQ ID NO: 19041 - DNA, 119 bp, homo sapiens
gccagcttcccgggcccggcgccgcagcgccgccaggcccggctgcagcaacggagagtggtccggtaggcgttgagctgcggccccgccgagggctgggatcgcgcctctgccatgcc

SEQ ID NO: 19042 - DNA, 119 bp, homo sapiens
gtccggtagcgcgttgagctgcggccccgccgagggctgggatcgcgcctctgccatgcccgccgccgcgctgcggccgcagctacccgggcacccgggaaaagcgcgcgccccgcgcc

SEQ ID NO: 19043 - DNA, 119 bp, homo sapiens
aggcctaggctgggcggtgtggaacagccgctcgaggtgctgggggacgcgtgagcgcgagccgcttcccacggctcggccgcggcgcgtagcccccgccacatcgggcctggctctcc

SEQ ID NO: 19044 - DNA, 119 bp, homo sapiens
gccgcttcctcacggctcggccgcggcgcgtagcccccgccacatcgggcctggctctcctcagccgccgctcggctcggtgcgcgcgggggtcttgagctcaccgccggcggggcggg

SEQ ID NO: 19045 - DNA, 119 bp, homo sapiens
tcagccgccggctcggctcggtgcgcgcgggggtcttgagctcaccgccggcggggcggggttacatgggcgcgaggaggggggagagaagaggagagcctaggtgccctcctctcccc

SEQ ID NO: 19046 - DNA, 119 bp, homo sapiens
agggccgccttgccccgcgcgcttggggccagctgcacgacaagccccagcatgctggggaggcggggccagtgacggacagggagctctgcgaattggcgcccggcaaggggtgctca

SEQ ID NO: 19047 - DNA, 119 bp, homo sapiens
aggcggggctcagtgacggacagggagctctgcgaattggcgcccggcaaggggtgctcaacggcgcgtcgcagagggaggcaggcgggtgggctgccggcggtggactcgtcggagcc

SEQ ID NO: 19048 - DNA, 119 bp, homo sapiens
acggcgcgtgcgcagagggaggcaggcgggtgggctgccggcggtggactcgtcggagccgcgggcggtaggtagggggcgggaaggagggttggggactggggaccgcggccggagtc

SEQ ID NO: 19049 - DNA, 119 bp, homo sapiens
gcgggcggtcaggtagggggcgggaaggagggttggggactggggaccgcggccggagtcgtgggccgtgctcagcggccaggcgggggaacgtgccggcgtgcagcggccgcgcccga

SEQ ID NO: 19050 - DNA, 119 bp, homo sapiens
taaaaacgacgggcgcccgtgtgcgaaccacggcggcaccacccacacgcagcgtggacgccctcacctcgctggagcgataggggttggtgtcgggcacatttctgggcaggaccagg

SEQ ID NO: 19051 - DNA, 119 bp, homo sapiens
ccctcacctgcgctggagcgataggggttggtgtcgggcacatttctgggcaggaccagggcttgtacatcctggtgtagtccagcagccgctccgccaccttcccgtcacctgctgtg

SEQ ID NO: 19052 - DNA, 119 bp, homo sapiens
gcttgtacagtcctggtgtagtccagcagccgctccgccaccttcccgtcacctgctgtgggaacagaatggggtagggaccacagggttccggatgctcgagtctccctaaagcgccg

SEQ ID NO: 19053 - DNA, 119 bp, homo sapiens
gaccccgcgggacttggggatttcctgcaaggaggtgctcaggcagggcggggagcagctgtgggcggggccccggggccctcgctctgcactgagcccctggagggactggtcccatt

SEQ ID NO: 19054 - DNA, 119 bp, homo sapiens
gtgggcgggggccccggggccctcgctctgcactgagcccctggagggactggtcccattccgggcttcaggtcctcctggctgcctcgaaaacgcctcctcctccagcccttgtcgtc

SEQ ID NO: 19055 - DNA, 119 bp, homo sapiens
ccgggcttccaggtcctcctggctgcctcgaaaacgcctcctcctccagcccttgtcgtccagggacaggctcgctccagtcgaggcctggcggggggccgcggggcgatgggtgctgc

SEQ ID NO: 19056 - DNA, 119 bp, homo sapiens
cagggacagggctcgctccagtcgaggcctggcggggggccgcggggcgatgggtgctgctcgggctgggggtcctcgccgctgggcgtggccggagtgctgcaggcaagcgcggggct

SEQ ID NO: 19057 - DNA, 119 bp, homo sapiens
tcgggctggcgggtcctcgccgctgggcgtggccggagtgctgcaggcaagcgcggggctctcggagccggagcatcgggtggggaccccgcgcgctgggccggcggagcgccgggaag

SEQ ID NO: 19058 - DNA, 119 bp, homo sapiens
ctcggagcccggagcatcgggtggggaccccgcgcgctgggccggcggagcgccgggaagctgtccttgagcgtcctcccttccggcggctgcggggccggctcggagggccgcagatt

SEQ ID NO: 19059 - DNA, 119 bp, homo sapiens
ctgtccttggagcgtcctcccttccggcggctgcggggccggctcggagggccgcagattctccgccttgacggcatggacggtctctcccggggcaggcctcggcgcgaggccgcagg

SEQ ID NO: 19060 - DNA, 119 bp, homo sapiens
ctccgccttggacggcatggacggtctctcccggggcaggcctcggcgcgaggccgcaggcagcgcgagggtcacgggtgccgggtccggggtcgccggcgcagcgaggagcagaaacg

SEQ ID NO: 19061 - DNA, 119 bp, homo sapiens
cagcgcgaggggtcacgggtgccgggtccggggtcgccggcgcagcgaggagcagaaacgccgctgcggtcccgcttgggccggggatggtcgcggaggggcgggggcggctgccgcat

SEQ ID NO: 19062 - DNA, 119 bp, homo sapiens
ccgctgcggctcccgcttgggccggggatggtcgcggaggggcgggggcggctgccgcatggcccgggcccgagtcccgccagcccctcggggctcccagacgccgttcccagggcggt

SEQ ID NO: 19063 - DNA, 119 bp, homo sapiens
ggcccgggccccgagtcccgccagcccctcggggctcccagacgccgttcccagggcggtccgcaggcaggcctgggggaacaggcggctgggcgcctgtcgcgggggaggttcgaccc

SEQ ID NO: 19064 - DNA, 119 bp, homo sapiens
ccgcaggcaaggcctgggggaacaggcggctgggcgcctgtcgcgggggaggttcgaccccgacggggagccgctcggggagaggggtgggaagcgggcacccctggctgggctcgcag

SEQ ID NO: 19065 - DNA, 119 bp, homo sapiens
cgacggggacgccgctcggggagaggggtgggaagcgggcacccctggctgggctcgcagactccgaagcgacccggtactcgcggaggcccggccgcccagaagcggagtcagcccgg

SEQ ID NO: 19066 - DNA, 119 bp, homo sapiens
cagcagctgcagaaggcccagcgccaagcggagcccgccgctgcccaggcagagcgcgtggaaggcccgggctggaagctcagcacgagctgcgtggctgcgtcccgcgtggggcagca

SEQ ID NO: 19067 - DNA, 119 bp, homo sapiens
gaaggcccgcggctggaagctcagcacgagctgcgtggctgcgtcccgcgtggggcagcagaaggtcccaggcgcggggaggccatgggctgtgttcgcggacgcggctcgggtgtgcc

SEQ ID NO: 19068 - DNA, 119 bp, homo sapiens
gaaggtccctaggcgcggggaggccatgggctgtgttcgcggacgcggctcgggtgtgccaggaccccgcggcctgcctgggtcatgtgctgggcgggctgggggcggcatcatgtgcc

SEQ ID NO: 19069 - DNA, 119 bp, homo sapiens
aggaccccgccggcctgcctgggtcatgtgctgggcgggctgggggcggcatcatgtgccctgggcctccccccaccccaacccccagcgcctgcagtagagccaggctcggtgggggc

SEQ ID NO: 19070 - DNA, 119 bp, homo sapiens
accacagcacacacaagaggcctcacaagccagggccatccagagaggcagggaagaggccgcgagggcgcactcactaactgagggcccggctgcagtcggcgctggcctccaggtgc

SEQ ID NO: 19071 - DNA, 119 bp, homo sapiens
tgcctcctccttccccagggggccgtggctgtggcaggcgtggtgccttcccacccaccccatggcggggcccctcaccagcatgcccagctgcgtggccagcacggccacgcgggcct

SEQ ID NO: 19072 - DNA, 119 bp, homo sapiens
ccccggcctggctcctaaggacctgggtcggccgccctagccctaaggccactcacctctgccaggccgtgagccgccgcgcgttgccgggacaacggcgcgccaggaacgcggaaata

SEQ ID NO: 19073 - DNA, 119 bp, homo sapiens
ggcacgcacgtgcagctccgaggcccgagcgtcgggggccaggttattccgctctgcaagagagaagcggacgagctttttctaggagagacggcggcgcagggccggcgtctgggtcc

SEQ ID NO: 19074 - DNA, 119 bp, homo sapiens
cagggaacaggatggggtcctggcggggaggggcggtgggtcagagccgggtcccaccatgcctcccattttgcccaccccctccaccagcctcacctgggggatgatgctgatcctgg

SEQ ID NO: 19075 - DNA, 119 bp, homo sapiens
cctccaccagcctcacctgggggatgatgctgatcctggagcgcagtgtgtgcagccccacgtgggcaaggggaccccgtcgatccagatcccaccctcagctgcctcctggagccgca

SEQ ID NO: 19076 - DNA, 119 bp, homo sapiens
gtgtgtgcagccccacgtgggcaatggggaccccgtcgatccagatcccaccctcagctgcctcctggaccgcagcagcccactggccagggaggacttccctgccccggtcctgccaa

SEQ ID NO: 19077 - DNA, 119 bp, homo sapiens
agcccactggccagggaggacttccctgccccggtcctgccaacgatgcccacctgcccggggttgggagaaaggcctgctctgaccagagggtttgtgggcatttattggggagatct

SEQ ID NO: 19078 - DNA, 119 bp, homo sapiens
acagggtcttcaaaggtcccactagcaggggtccgacagtctctgcctctgtctgtccctcaagcccagttggggatgtggggagtacctggagggcagcagagacagagaagcccacg

SEQ ID NO: 19079 - DNA, 119 bp, homo sapiens
tgcctctgtctgtccctcaagcccagtttggggatgtggggagtacctggagggcagcagagacagagagcccacgaggccagcactgaggtgggctttgctcagcacagcacacgtgg

SEQ ID NO: 19080 - DNA, 119 bp, homo sapiens
ctgcagccaaaccaagcctggaaaaggagagtggggcgcgatggggggcactcaccccctgccccgcgcgggctcagcaggcgcggccatcggcgccttctgtcgtcgtgggtcccagc

SEQ ID NO: 19081 - DNA, 119 bp, homo sapiens
aaaggagagtggggcgcgatggggggcactcaccccctgccccgcgcagggctcagcaggcgcggccatggcgccttctgtcgtcgtgggtcccagcgtctgtctgtcgctaagtctct

SEQ ID NO: 19082 - DNA, 119 bp, homo sapiens
ccccgcgcagggctcagcaggcgcggccatcggcgccttctgtcgtcgtgggtcccagcgtctgtctgtgctaagtctctgggcagactgctcggccgcgatcctgccggagaagaggc

SEQ ID NO: 19083 - DNA, 119 bp, homo sapiens
catcttctttctcctcttcaatccgggacagctctctgagttggggttagaggcaggaggtgagcccaccgaagctgccccgctgagtctacctcctgcctctattttctgtaggatgt

SEQ ID NO: 19084 - DNA, 119 bp, homo sapiens
ccccacccgtcccttcccttatcagcacccgcggccccggcagcgccgacgcaggcgcactgcaccgcgcgccgccattttgtgtctgagcctgtggagcgattaaaccgtgcgcggag

SEQ ID NO: 19085 - DNA, 119 bp, homo sapiens
cctcccccgaatccaggcagggccccaaaaggacctcactcactgcgggaggcacccacgggtgccatgtgtccgaggactccgagctctcgctgtgggagctcccctcgctcatcctc

SEQ ID NO: 19086 - DNA, 119 bp, homo sapiens
cactcactgcgggaggcacccacgggtgccatgctgtccgaggactccgagctctcgctgtgggagctccctcgctcatcctccgtcctgggcgctggaacctcgaggcctgagggggc

SEQ ID NO: 19087 - DNA, 119 bp, homo sapiens
cacgggtgccatgctgtccgaggactccgagctctcgctgtgggagctcccctcgctcatcctccgtccgggcgctggaacctcgaggcctgagggggcgaggcaggggcatccagaag

SEQ ID NO: 19088 - DNA, 119 bp, homo sapiens
tcgctgtgggagctcccctcgctcatcctccgtcctgggcgctggaacctcgaggcctgagggggcgagcaggggcatccagaagtggcgggctgtcccgggagctgccctccaggaag

SEQ ID NO: 19089 - DNA, 119 bp, homo sapiens
gggggcgaggcaggggcatccagaagtggcgggctgtcccgggagctgccctccaggaagagggggctggggtgtgtagggcatcagctggagggggaatttcaaggtcaggctgagtc

SEQ ID NO: 19090 - DNA, 119 bp, homo sapiens
gtcagaggcccctccgctgggatagggtcggtctgagggcgcaggcgagtccctgctgacccctgacgctccgacggggggaggggcaggccgggtgggagcgggaagccggggcggca

SEQ ID NO: 19091 - DNA, 119 bp, homo sapiens
ccccccgccctctccgccgtgttcacggtgggggtcctgggcccctgggcttgcgaccccatcttctctgggctcgcccggacctggccgcccgcctggccgccgcccgcctgaaccgc

SEQ ID NO: 19092 - DNA, 119 bp, homo sapiens
cgaagaagccgggatcgcgctggtgccctggggctgcccctggacgcaggcggagggcaccacggccccgccgtgacccccgccgcggatgccctctacgccctgcttcgcgcattcgg

SEQ ID NO: 19093 - DNA, 119 bp, homo sapiens
attagcctggaaggggcgggaccaggggtccgtgcccaataggaagggagcagaggagtgagtcctggcgcgtccccgtcgctagggaaaccgatgcagctggaggccgcgcgcgatgc

SEQ ID NO: 19094 - DNA, 119 bp, homo sapiens
cccaataggaagggagcagaggagtgagtcctggccgcgtccccgtcgctagggaaaccgatgcagctgaggccgcgcgcgatgcggctcgcggaggagcgggccgcgctcgcggcgga

SEQ ID NO: 19095 - DNA, 119 bp, homo sapiens
cgatgcggctcgcggaggagcgggccgcgctcgcggcggagaacgcggatggggaacccggcgccgaccacgactgcgactcctggggacctacgtggccatgagcctgcggccggctg

SEQ ID NO: 19096 - DNA, 119 bp, homo sapiens
gctcgcggcggagaacgcggatggggaacccggcgccgaccgacgactgcgactcctggggacctacgtgccatgagcctgcggccggctgcgggcgcctgggagcgttgcgcggggag

SEQ ID NO: 19097 - DNA, 119 bp, homo sapiens
tgggagcgttgcgcggggagtgctgaggcggagcagctgctccaggccttcctgggccgcgatgctgccaggggccgcggccgctgctggtggtgcggcccgggcccaggggcctggca

SEQ ID NO: 19098 - DNA, 119 bp, homo sapiens
cgctgctggtggtgcggcccgggcccaggggcctggcaatacgccccgggctggaggtgggacctgagtgggcctggctggcgctaaggcgctttttttccttcgcaccgggcccgagc

SEQ ID NO: 19099 - DNA, 119 bp, homo sapiens
taaggcgctttttttccttcgcaccgggcccgagcctccagggcccgacagcttccgcggcgcagtggttgcggggacctgcccgcggcacctctggagcacctagccgcgctgttctc

SEQ ID NO: 19100 - DNA, 119 bp, homo sapiens
ctccagggcccgacagcttccgcggcgcagtggtctgcggggacctgcccgcggcacctctggagcaccagccgcgctgttctcggaggtgagggtgggttagtgtccccgcgcggcta

SEQ ID NO: 19101 - DNA, 119 bp, homo sapiens
cgcggcgcagtggtctgcggggacctgcccgcggcacctctggagcacctagccgcgctgttctcggagtgagggtgggttagtgtccccgcgcggctaaagctgggtgggggagggga

SEQ ID NO: 19102 - DNA, 119 bp, homo sapiens
gcccctcgcaccctctccccttcccacccgcgggcggcgctccctcgcgggtgctcaccaccggtgatcgctgcagccccagcacgtcctccggcccgatcggctgcttcctctgcagc

SEQ ID NO: 19103 - DNA, 119 bp, homo sapiens
ccacccgcgggcggcgctccctcgcgggtgctcaccaccggtgatccgctgcagccccagcacgtcctcggcccgatcggctgcttcctctgcagcggccccggcctgggccctgggcc

SEQ ID NO: 19104 - DNA, 119 bp, homo sapiens
ggcccgagggccccggagcggactccgtcgccgtcccggccccaccgccgcccttcttcaccttcatggcttgcggggccgaggctcgcctgctgctgccgccgctgcctgcgccggct

SEQ ID NO: 19105 - DNA, 119 bp, homo sapiens
ccgcccttcttcaccttcatggccttgcggggccgaggctcgcctgctgctgccgccgctgcctgcgccgctggagccgggggaagtgggagcatccgcagccccgcccccggccgggg

SEQ ID NO: 19106 - DNA, 119 bp, homo sapiens
aaggtgacagtgcctgtggtctctgtgcggagtccaaagcggctcaggcgttccccctgtggcatgccatgggacagcctcaggtttctgctctctctagacacccccgcaccatgctg

SEQ ID NO: 19107 - DNA, 119 bp, homo sapiens
ccccaggggccttccaactcctgctcctccatcccccccgccaggctggacactcacagctctgtgtccccagggccggcgggcgctccatcgcctgccgccgcctcctcacggccccc

SEQ ID NO: 19108 - DNA, 119 bp, homo sapiens
gcgggcgggggacacggagaaaggccccccgcaggggagggcggcggtattagggctgaggcatgaggtggaggacggggccgggcaggggccggggccgccagcccccgctgccgcag

SEQ ID NO: 19109 - DNA, 119 bp, homo sapiens
tctaagagctgcccaggctgctgccgcgggtcagaggcgggtcagagcaggcagggggttcgtgacgccgctgggtctgggggctgtgggccagccgagccgacccgggcttctggggg

SEQ ID NO: 19110 - DNA, 119 bp, homo sapiens
cccgtcccccaggccgcgacggagggttctggtacacgggcagccacggcagcgtgtgcagcgacggcgacgcgccgaggacttcgtcttcgagttccgtgagcgcggccgcctggcca

SEQ ID NO: 19111 - DNA, 119 bp, homo sapiens
cacggcagcgtgtgcagcgacggcgaacgcgccgaggacttcgtcttcgagttccgtgagcgcggccgctggccatccgcgcccggagcggcaagtacctgcgcggcggcgcctcgggc

SEQ ID NO: 19112 - DNA, 119 bp, homo sapiens
cccggccgggaccgcgctttgggagtactgaggccgcgcccagaccagcctgtcgcgcattaaaaccgttctctcccgcagctgtgggtgggccccggggcgccgcttgggggtcctgc

SEQ ID NO: 19113 - DNA, 119 bp, homo sapiens
gtggctgtcaccagggcacgtccccggttctcgggttgggccgaggagggggcccgggagggcggcaggtcaggctggcggccaggccctgtccagagcctgtgcatgttccttggcca

SEQ ID NO: 19114 - DNA, 119 bp, homo sapiens
gccaggccctgtccagagcctgtgcatgttccttggccagcagccgcagggacgcctcctccagggcgagccatctgcgaaggtgggagcaaaggcatgaggcccgaaggacgcttgca

SEQ ID NO: 19115 - DNA, 119 bp, homo sapiens
ctccgtggctcctggtcctccaggtcctctggcagctggaagttgcggtccagcacctcggccgcctccgccagttggcgaagcaggcggtgcccaggcgctggatctcgtcggcgccg

SEQ ID NO: 19116 - DNA, 119 bp, homo sapiens
ctggccgccgacgagcgcgccgagttcgagcggctctgggtggccttctcgggctgcctggacctgctgaagcggacatgcgacgcgcgctggagctgggcgccgcgttcccgctgcac

SEQ ID NO: 19117 - DNA, 119 bp, homo sapiens
acctgccaatgagtcaaacatagtatctttatgtagatacttagattactaaatatatatttcatctactctgaagttgatagtcttcccccccccccacttttttcttttttgagaca

SEQ ID NO: 19118 - DNA, 119 bp, homo sapiens
gacctgcagaagcgcctggcagtgtaccaggccggggcccgcgagggcgccgagcgcggcctcagcgcctccgcgagcgcctggggcccctggtggaacagggccgcgtgcgggccgcc

SEQ ID NO: 19119 - DNA, 119 bp, homo sapiens
tgcaaatattaagggtaattatttaatgaaactttcattccaatgatatgtacataagcacatacactaatataatagatgatgttatgttacacatgacataaaatatatattttata

SEQ ID NO: 19120 - DNA, 119 bp, homo sapiens
tggcttcctgcgcgttggcgcaacggaagaggcggccggccgagggcgcgcctctgctctggctggactccgcggaggaggcgagaaggaatccgacgctggggggcttgctcgggcgg

SEQ ID NO: 19121 - DNA, 119 bp, homo sapiens
ccgagggcgcgcctctgctctggctggactgccgcggaggaggcgagaaggaatccgacgctggggggctgctcgggcggcagcgactgctgctgcggatgggagggggccggctcggc

SEQ ID NO: 19122 - DNA, 119 bp, homo sapiens
aaagcggccgcgtaagtgttccgtggggcgccctcccggcccgccctgcccccccttccggcccacccttccccttccggccccgccgccgtttttcccgcgcgcggacactgtccccg

SEQ ID NO: 19123 - DNA, 119 bp, homo sapiens
atttacataactatacaaagttctacttttgacatttttttctttaaattcttcattttaccagcaactctgacatcaaagtctcccctcccccaacaacaaaaatacaattaaaaaaa

SEQ ID NO: 19124 - DNA, 119 bp, homo sapiens
attgcaggtgccggccccccggggcttcaggataccgggctgctgactggaggaaaacgggaggagggcgaggtcttcatgcttccttcccacggccaggctcagtgctggtgctcagg

SEQ ID NO: 19125 - DNA, 119 bp, homo sapiens
tgaatgctcactgccacggctggggcccaacaaggcactcacctcgctcacagaggcgccgcaccagattgtcgccacgctaggaaaaaagaaaaacagcttagttgagttatgataaa

SEQ ID NO: 19126 - DNA, 119 bp, homo sapiens
gcccaacaaggcactcacctcgctcacagaggcgccgcaccagatttgtcgccacgctaggaaaaaagaaaacagcttagttgagttatgataaaattgtttgagatgatatgggcctt

SEQ ID NO: 19127 - DNA, 119 bp, homo sapiens
ggcagcgcgccggaggccaaggttgccccgcacggcccggcgggcgagcgagctcgggctgcagcagcccgccggcggcgcgcacggcaactttggagaggcgagcagcagccccggca

SEQ ID NO: 19128 - DNA, 119 bp, homo sapiens
gcgcatcatgctgtgggctgcgcgccgctgcaccttccagtgctccgagtagtggccgaaagccatgctcggccgccggacaccacacggaaggaggcgaaggccggccggtcggcgaa

SEQ ID NO: 19129 - DNA, 119 bp, homo sapiens
gtgctccgagtagtggccgaaagccatgctgcggccgccggacaccacacggaaggaggcgaaggccggcggtcggcgaaggccgagccctgctgcaccagggcctggtggatggcgcg

SEQ ID NO: 19130 - DNA, 119 bp, homo sapiens
gaaggaggcgaaggccggccggtcggcgaaggccgagccctgctgcaccagggcctggtggatggcgcgtcgccattcagcaccactatggggcagctgcccaggcggatctggaaaac

SEQ ID NO: 19131 - DNA, 119 bp, homo sapiens
ctgcaccagggcctggtggatggcgcgctcgccattcagcaccactatggggcagctgcccaggcggattggaaaacgtcgccgtagcgccgcgccaggcgagcgaacgagaggtgagc

SEQ ID NO: 19132 - DNA, 119 bp, homo sapiens
aacgtcgccgtagcgccgcgccaggcgagcgaacgagaggtgagccgcctggcccaccgccgccgcgttccgatcagtggccacgcaaacgggcccgggggcgcggaccggagctgccg

SEQ ID NO: 19133 - DNA, 119 bp, homo sapiens
ccacgcaaacgggcccgggggcgcggaccggagctgccgcctccgttgcctcagcagccgctggcccactgcacagtggccagcaccgacaggagtagcaggagcgtggtctgctggat

SEQ ID NO: 19134 - DNA, 119 bp, homo sapiens
ctggcccacatgcacagtggccagcaccgacaggagtagcaggagcgtggtctgctggatggacagcggtttagcggccaagggtcgttcgggctgaggctggtgcccatgctggggac

SEQ ID NO: 19135 - DNA, 119 bp, homo sapiens
gcagaagcgctcgctcccactcccactccagagtcaaagcgcgccatcccgctcctccgggttttaaggctgggtagaaggagggcagcgcgacctggcagggcggggcctgcgggggg

SEQ ID NO: 19136 - DNA, 119 bp, homo sapiens
ggcccgggacgggaaagctggtgcggcccctggcaacccgggggcgcctagctagggagccggttgctagggcgccgtaactggggacgctacaggagccgccagggaccaaaagtcac

SEQ ID NO: 19137 - DNA, 119 bp, homo sapiens
taaatatgaattgactattgcccctttatcttagctatggtttggggaaacaagcatttttttatttccaagaaatgttagaatttctatgctgaactgcattttaaaataaaatataa

SEQ ID NO: 19138 - DNA, 119 bp, homo sapiens
tttttgacaaaatcttgcttttatagaaatctataccattaacttaagtagctgtttttgaaaaaataatactgtttaaatttagatataacagtattccttataaaaatttattttat

SEQ ID NO: 19139 - DNA, 119 bp, homo sapiens
acttgaattaacttccacttaataaaaatacttgtataggaagagatgttttaataatgtgattaacctaatacttactttgcttaatttttgaagagcatttttattttcatctattg

SEQ ID NO: 19140 - DNA, 119 bp, homo sapiens
gattaacctcaatacttactttgcttaatttttgaagagcatttttattttcatctattgcctgctttactggatacatctaaattaagaaaaaaaagaaaatatattgatttttctat

SEQ ID NO: 19141 - DNA, 119 bp, homo sapiens
taatatatatttatttaaagagaaaaaatatgtgtatatcatggaaaaagacaaggatattttaataaacattacttatttcatttcacttatcttgcatatcttaaaattaagcttca

SEQ ID NO: 19142 - DNA, 119 bp, homo sapiens
aaataaataaataaaagaatataacaaaaacactttaaaagagaacaatgcattttaaatatatttcctaaataatattccttagaaaagatacagggtatttaattacctagatttta

SEQ ID NO: 19143 - DNA, 119 bp, homo sapiens
aacactttaaaagagaacaatgcattttaaatatatttcctgaaataatattccttagaaaagatacaggtatttaattacctagattttaacaaaatattctttatagaaataattat

SEQ ID NO: 19144 - DNA, 119 bp, homo sapiens
aaagtattttttctcagtgtaccatatcatgctctttacattctttgcttttggattttagctgtcggtacaattgcatattgaatattacaacaaggactgctaactctgtaagtcta

SEQ ID NO: 19145 - DNA, 119 bp, homo sapiens
gctgtcggttacaattgcatattgaatattacaacaaggactgctaactctgtaagtctaaaaaatcttttgcaatatatatatagtaaagaaactagatatttgagattgatgtttgt

SEQ ID NO: 19146 - DNA, 119 bp, homo sapiens
cgggggcgcctcttcctcccggccgccctccagggcactcacccggttcctgcgcctcctccagggcatgcggagtcgcaggctgggcccgagccaggggtccggggaggcctttggag

SEQ ID NO: 19147 - DNA, 119 bp, homo sapiens
gggcatggcggagtcgcaggctgggcccgagccaggggtccggggaggcctttggagaaggaggtggaggcgcggcagccccagctctagccgcgtccagcgctgccacagcaacggcg

SEQ ID NO: 19148 - DNA, 119 bp, homo sapiens
gcttggagacctcgggctagcagccgcagcggccagaccaggaccggcctctctctcccctcagctccccttctgatcccttctccttccccctagcctcgcagtgccctcctggaacc

SEQ ID NO: 19149 - DNA, 119 bp, homo sapiens
aataatagagttcatctagtccaacctcctactggtgaataaacactgattttgtgtttatagaaaaaatatttgaagttggaaacaggaatttgagtttgaaaatgctttgttgccta

SEQ ID NO: 19150 - DNA, 119 bp, homo sapiens
cactttctttactatttgttcaatagcctatatttctagatattaaatattttttgtaagatatatgcaatagaagggggacttctaggaatttataaccaaaattttaaaactatttt

SEQ ID NO: 19151 - DNA, 119 bp, homo sapiens
taatttcttaatttaaaatgatagcacttctcttgcacttaagaatggcatccataagattctgtatttgcatttagactaacttctagatgtatatttttaataatagattcataatg

SEQ ID NO: 19152 - DNA, 119 bp, homo sapiens
tgaaattaaatataatatagaattcacattttatatagctctctcaaaaattaatttttattccttaagattttaaaaacattttaaaaaatgttttgtaaatccaggtgtattttaac

SEQ ID NO: 19153 - DNA, 119 bp, homo sapiens
ttttatatagctctctcaaaaattaatttttattccttaagcattttaaaaacattttaaaaaatgtttgtaaatccaggtgtattttaacaattaaatgcctattttgttatatgtta

SEQ ID NO: 19154 - DNA, 119 bp, homo sapiens
taatttttattccttaagcattttaaaaacattttaaaaaatgttttgtaaatccaggtgtattttaacattaaatgcctattttgttatatgttatacttttattcttaattctgaat

SEQ ID NO: 19155 - DNA, 119 bp, homo sapiens
gtaaatccaggtgtattttaacaattaaatgcctattttgttatatgttatacttttattcttaattctaattttgacattttcacacaataaaaataatttatatcaatattctgttt

SEQ ID NO: 19156 - DNA, 119 bp, homo sapiens
tgtctttttaaaaaatttagtttatgactttgcagtatgaattgtgcttgtgaaaaagaactttaaatattataagggaccatgggtaattaatatatattcaatttttactatgtgtc

SEQ ID NO: 19157 - DNA, 119 bp, homo sapiens
aactttaaatatttataagggaccatgggtaattaatatatattcaatttttactatgtgtcactgtcataaaatgtaaaatataatgtgccaactagtgcgctttgtttatgctgaaa

SEQ ID NO: 19158 - DNA, 119 bp, homo sapiens
tattttaaaacagtgaagtgtggctattacatatttcacttttacaatcaatacatgttaggatcttacagtattaaattgatgattttattatatataaatacacaaatggtccaaaa

SEQ ID NO: 19159 - DNA, 119 bp, homo sapiens
tgtcagtggagggcgagtgctggttctcaggggaggcgacgcccttcggggccaacgggcctcgagccgggcagcagtgggaacgactcatcctttttccagccctggggcgtggctgg

SEQ ID NO: 19160 - DNA, 119 bp, homo sapiens
acttaatattttatatatacatttccatgtattgatgtagttagtccacatttaaatttttatagaatttatagtttttgaaaaatacagtcagtagatgttttattttttagctattc

SEQ ID NO: 19161 - DNA, 119 bp, homo sapiens
ctggagtggagggaggccgaaggccccgcccctgccccgccccctcgtgcagaaggccgcgctagccggtcttcagcagcgagtgcagattgctcccccgcggccgcagatctcccgtt

SEQ ID NO: 19162 - DNA, 119 bp, homo sapiens
ggttcctgcaggcctgggacggcgggcctgctcgaggactgaccttcccggaggcgccgtcccccagcagacgattttcagttgccggtcctggctctcctcctcagagtccgacatgg

SEQ ID NO: 19163 - DNA, 119 bp, homo sapiens
ccggaggcgccgtcccccagcacgacgattttcagttgccggtcctggctctcctcctcagagtccgactggtgtcccgggaaccaggcccgcccctcgaggtggggggggaagggaag

SEQ ID NO: 19164 - DNA, 119 bp, homo sapiens
ggaggtattcgaggagaatcactcggcaagcgccatcttgcccacctccccgccctctgcgcgcggcccgccccctacgcgcacgtcgggcgcgcgcccccgcctcagagccaacccgc

SEQ ID NO: 19165 - DNA, 119 bp, homo sapiens
cataataatatcaacctcccccatcccatctaggaatatagtttttttaaaaaggcttactttttcatggtatagtttcaacactataaaatacaaaaaagggagataaaattaatttt

SEQ ID NO: 19166 - DNA, 119 bp, homo sapiens
aaataaaaaggctggttagggaagctgagaggattaagcaagaggaaaaaagtagttaaaacaagtataaaaaatcagtaccaagaaaaaaaaattcacctgaacagaagtgacccaac

SEQ ID NO: 19167 - DNA, 119 bp, homo sapiens
atcgtacacgtcctccgaatccattcgacgatagtacttagccagttttaccgcaaaaattagagccggagtaaaaatacagtagcttttcctatgccaaaccaaaacaaattctagga

SEQ ID NO: 19168 - DNA, 119 bp, homo sapiens
tccattcgacgatagtacttagccagttttaccgcaaaaattagagccggaagtaaaaatacagtagctttcctatgccaaaccaaaacaaattctaggaaaaaaaaatcagaagaatt

SEQ ID NO: 19169 - DNA, 119 bp, homo sapiens
aaaaaaaaaaaaaaaaaaagtaaatcatatctttatgttctgattgctttcagagctgattatattgtgaaatctttgatcgccatggtcaaaaaagaagtgaaattaacttacctggg

SEQ ID NO: 19170 - DNA, 119 bp, homo sapiens
ttaaaacagttttatataaagatcatatatattttttaataatgcatttttgtttttcagcattaaaatcaagacttggttgacttaaaagacatgtatgttatactcaacctggatga

SEQ ID NO: 19171 - DNA, 119 bp, homo sapiens
tattaaaattattaaaattcactcttatttttttttcaggggtgattatgtaaatgctttggctcattagagaaaggaataacaggtgataataaggtaaccttggataaagataagat

SEQ ID NO: 19172 - DNA, 119 bp, homo sapiens
ctttttctttttttcttctggttccctaaagaaaaaaataatatatctgtcacataatcacagtcttccctcttatttactttctttttcattgagcaaaaatctcagctttgcattca

SEQ ID NO: 19173 - DNA, 119 bp, homo sapiens
attgttcttcatggatagtttcatatctgaggagaaagaagtcttattagtggaaaggctatttttataatttacatatataatcaaaagtttcaccctatgtattagtctgtcctcat

SEQ ID NO: 19174 - DNA, 119 bp, homo sapiens
gtacctccacaacatcctccccccatccctcccagactccgtgctggctcctacccggactcgggcttcgtaaggttggtccacacagcgatttcttcgcgtgtggacatgtccgggta

SEQ ID NO: 19175 - DNA, 119 bp, homo sapiens
cgggaatgtctgcagggcggcgcggcgccttacctgcggcctccgggctggaggtgtcggagatggtgtcacctccagcctgtgcttggaggagtccagcgaccggggctgaccgggag

SEQ ID NO: 19176 - DNA, 119 bp, homo sapiens
cttggtccccgctgctcggtgctccaagtgaagcgggcctttcatgcagttcatggacgagggagcgcgcgctctactagtccttggctactgccccgccgagcccccgtagccgccgc

SEQ ID NO: 19177 - DNA, 119 bp, homo sapiens
acgcacacccctcgggcggtcgaacaggagccgggccttgccgcagctcagctccaggcacccaggcgacgacggaccagatctgcggctccgcgcttccctgttggcctaacatctta

SEQ ID NO: 19178 - DNA, 119 bp, homo sapiens
ttgccgcagctcagctccaggcacccaggcgagcgacggaccagatctgcggctccgcgcttccctgttgcctaacatcttaaaaccagaggcgggcttcctggtgccgagacgtcact

SEQ ID NO: 19179 - DNA, 119 bp, homo sapiens
tctggcctgagtaccgtttccctgcgtctcggcctctcctgaagggagctgggccctggggagcctctgccaaggtcgctgcctacaggaggggctgcccggcgctgtggcgtggggat

SEQ ID NO: 19180 - DNA, 119 bp, homo sapiens
cccgctagcgagaacgcgggcggggactctgccgattcgatccttgtgggcccgtgggcccagaagtagagtttggcggctccagatttagtgattctgcagtaaaatcacaggattag

SEQ ID NO: 19181 - DNA, 119 bp, homo sapiens
ggcgcgcgggcggccggccgagcccggctgcgcggctggcgatccaggagcgagcacagcgcccgggcggcgccggggggagcgagcaggggcgacgagaaacgaggcaggggagggaa

SEQ ID NO: 19182 - DNA, 119 bp, homo sapiens
agcacagcgcccgggcgagcgccggggggagcgagcaggggcgacgagaaacgaggcaggggagggaagagatgccagcgggccgaagagtcgggagccggagccgggagagcgaaagg

SEQ ID NO: 19183 - DNA, 119 bp, homo sapiens
tagactttaatcaaaatggcataatagaaatgaaagcatgtgaagaattcttttatatttttactcacccagaatcacagctgctaaagctaacaacagcagaatttttatccacatca

SEQ ID NO: 19184 - DNA, 119 bp, homo sapiens
acagctgctaaagctaacaacagcagaatttttatccacatcaagtaaatctattggaacatcactctaagtcaatattaaaaaaaaagaaggttgagatggaaaacctaaaaatgttc

SEQ ID NO: 19185 - DNA, 119 bp, homo sapiens
caaaatatcacatgcaccccataaaaatgtacaactatcatgtatcaataaaatacccatagaatatacaaaaagaaactaacagaaaacaatttaaaatattttaaatgacaaaacaa

SEQ ID NO: 19186 - DNA, 119 bp, homo sapiens
ccgggtccggggagcttacgaggaggccaggatcgcggggtaaggaatccgcgggcagttacctccgccggggcagggtccggccagtcaggcgcgagaaggctaggcgaggccgactg

SEQ ID NO: 19187 - DNA, 119 bp, homo sapiens
ggaatccgcgggcagttacctccgccaggggcagggtccggccagtcaggcgcgagaaggctaggcgagccgactgcgcggggtgaagacgccaggccgacagctgcgggccctaccgc

SEQ ID NO: 19188 - DNA, 119 bp, homo sapiens
aaaaaaaaaaaaaaagaaattttgtatatataaccattttaatcttttataaagttttgaatgttcatgatgaatgctgcagctgtgaagcatacataaataaatgaagtaagccatac

SEQ ID NO: 19189 - DNA, 119 bp, homo sapiens
aattcattattttatttttgggattttattttagaaaccttcagcaaatgtgaagcttggatggccaagactgttactgtgacaatattatcaaatgacaatgcatttggaattatttc

SEQ ID NO: 19190 - DNA, 119 bp, homo sapiens
atgtgaagcttggatggccaaggactgttactgtgacaatattatcaaatgacaatgcatttggaattattcatttaatatggtatggacacaatttgatgataattgtggttgctaga

SEQ ID NO: 19191 - DNA, 119 bp, homo sapiens
cctgcttgtccctagcgagccagcgagccacacagccagctagcgcgcggagcaggggcccagagtagcccgcgcttggctcactcgctggacctctcgcccggccgcacctcctcacg

SEQ ID NO: 19192 - DNA, 119 bp, homo sapiens
cggcggcgagcagagctactaccgcgcggcggccgcggcggccgggggcggctacaccgccatgccggccccatgagcgtgtactcgcaccctgcgcacgccgagcagtacccgggcgg

SEQ ID NO: 19193 - DNA, 119 bp, homo sapiens
cccccgcccgcgccgccggagcaggccgacggcaacgcgcccggtccgcagccgccgcccgtgcgcatcaggacatcaagaccgagaacggtacgtgcccctcgccgccccagcccctg

SEQ ID NO: 19194 - DNA, 119 bp, homo sapiens
agcccctgtccccggccgccgccctgggcagcggcagcgccgccgcggtgcccaagatcgagagccccgcagcagcagcagcagcctgtccagcgggagcagccccccgggcagcctgc

SEQ ID NO: 19195 - DNA, 119 bp, homo sapiens
gatcgagagccccgacagcagcagcagcagcctgtccagcgggagcagccccccgggcagcctgccgtcgcgcggccgctcagcctggacggtgcggattccgcgccgccgccgcccgc

SEQ ID NO: 19196 - DNA, 119 bp, homo sapiens
attaagtttcttcagagactgaaaaataacaaatatgccttaaaatttcttaaaaaaaacttacagaattggcaaaattgcatcaatgctaagtgtaataattaccttatgtaattttc

SEQ ID NO: 19197 - DNA, 119 bp, homo sapiens
gaggcggctgtaaggtagttgacgatgtccctaacagcgaattccaaggcgcccgtgtagcaggagagggcaagtcggccacgatgcgtgcactgtgcatcagggagacctgcagctcc

SEQ ID NO: 19198 - DNA, 119 bp, homo sapiens
gcgaattccaaggcgcccgtgtagcaggagaggagcaagtcggccacgatgcgtgcactgtgcatcaggagacctgcagctccgagctggggttcagcaggaactggtcccgcaggaag

SEQ ID NO: 19199 - DNA, 119 bp, homo sapiens
cgtgcactgtgcatcagggagacctgcagctccgagctggggttcagcaggaactggtcccgcaggaaggtgagcaggcggccaagatgaccttgtggcctcgaaacttgaggctgtcg

SEQ ID NO: 19200 - DNA, 119 bp, homo sapiens
tgcacatgtgcacgcatgggtgggtggagcgtgggggcagtacacaaagcctgtgggggagatctattgccctatagatatattagcatcagggagacagggcaaaggtttcacccttc

SEQ ID NO: 19201 - DNA, 119 bp, homo sapiens
gcagcaatgaagcagctgctgacccagctctagttttcgggaagtcagatgaccttttccctcccgcggtctctacctctcgccgcccctagggaggacaccatgggcccactgatggt

SEQ ID NO: 19202 - DNA, 119 bp, homo sapiens
tacctctcgccgcccctagggaggacaccatgggcccactgatggttcttttttgcctgctgttcctgtcccaggtaggaggcagggaagggggaacgtcagggtcctgtgtgtgaggt

SEQ ID NO: 19203 - DNA, 119 bp, homo sapiens
caggtgttatccatccagtcctatattccccacccacttcctctctctccagctgtgcgctgtccagccctgtctcctttgagaatggcatttataccccacggctggggtcctatccc

SEQ ID NO: 19204 - DNA, 119 bp, homo sapiens
tatattccccacccacttcctctctctccagctgtgcgctgtccagcccctgtctcctttgagaatggctttataccccacggctggggtcctatcccgtgggtggcaatgtgagcttc

SEQ ID NO: 19205 - DNA, 119 bp, homo sapiens
gtgcgctgtccagcccctgtctcctttgagaatggcatttataccccacggctggggtcctatcccgtggtggcaatgtgagcttcgagtgtgaggatggcttcatattgcggggctcg

SEQ ID NO: 19206 - DNA, 119 bp, homo sapiens
cacggctggggtcctatcccgtgggtggcaatgtgagcttcgagtgtgaggatggcttcatattgcgggctcgcctgtgcgtcagtgtcgccccaacggcatgtgggatggagaaacag

SEQ ID NO: 19207 - DNA, 119 bp, homo sapiens
gcttcgagtgtgaggatggcttcatattgcggggctcgcctgtgcgtcagtgtcgccccaacggcatgtggatggagaaacagctgtgtgtgataatgggggtgagttctctggctgat

SEQ ID NO: 19208 - DNA, 119 bp, homo sapiens
tctgctggcaactgaggccgctgaggaggcagagcctgatgggagggggctactcacctctgccttccttgttcactcgcagctggccactgccccaacccaggcatttcactgggcgc

SEQ ID NO: 19209 - DNA, 119 bp, homo sapiens
ggcgcagtgcggacaggcttccgctttggtcatggggacaaggtccgctatcgctgctcctcgaatctttgctcacggggtcttcggagcgggagtgccagggcaacggggtctggagt

SEQ ID NO: 19210 - DNA, 119 bp, homo sapiens
tgtggctctccccacagaaccctactcttatgacttccctgaggacgtggcccctgccctgggcacttcttctcccacatgcttggggccaccaatcccacccagaagacaaagggtga

SEQ ID NO: 19211 - DNA, 119 bp, homo sapiens
cgctctggtcatctgaacctctacctgctcctggactgttcgcagagtgtgtcggaaaatgactttctctcttcaaggagagcgcctccctcatggtggacagggtcaggaatcaggag

SEQ ID NO: 19212 - DNA, 119 bp, homo sapiens
cagctttgagatcaatgtgagcgttgccattatcacctttgcctcagagcccaaagtcctcatgtctgtctgaacgacaactcccgggatatgactgaggtgatcagcagcctggaaaa

SEQ ID NO: 19213 - DNA, 119 bp, homo sapiens
gggaagtttctaagagagtccttccttttggcatattccagatcatgaaaatggaactgggactaacactatgcggccttaaacagtgtctatctcatgatgaacaaccaaatgcgact

SEQ ID NO: 19214 - DNA, 119 bp, homo sapiens
ccaagacagctgttgaccatatcagagagatcctgaacatcaaccagaagaggaatgactatctgggtggcccctgccactgccaccacatttgttctgctcctgcagaggtcatgaga

SEQ ID NO: 19215 - DNA, 119 bp, homo sapiens
tagccccaaagccacaggagtctggtgatttccctcttccccaccagacatctatgccatcggggtgggaagctggatgtggactggagagaactgaatgagctagggtccaagaagga

SEQ ID NO: 19216 - DNA, 119 bp, homo sapiens
ctatgccatcggggtgggcaagctggatgtggactggagagaactgaatgagctagggtccaagaaggaggtgagaggcatgccttcattctgcaggacacaaaggctctgcaccaggt

SEQ ID NO: 19217 - DNA, 119 bp, homo sapiens
aactgaatgagctagggtccaagaaggatggtgagaggcatgccttcattctgcaggacacaaaggctcgcaccaggtctttgaacatatgctgggtgagtgagctttgccctccttgg

SEQ ID NO: 19218 - DNA, 119 bp, homo sapiens
gatggtgagaggcatgccttcattctgcaggacacaaaggctctgcaccaggtctttgaacatatgctggtgagtgagctttgccctccttggtgtggggaggatggtgaggagcccgc

SEQ ID NO: 19219 - DNA, 119 bp, homo sapiens
gatcctcacacccacagatgtctccaagctcacagacaccatctgcggggtggggaacatgtcagcaaagcctctgaccaggagaggacaccctggcatgtcactattaaggtaccagg

SEQ ID NO: 19220 - DNA, 119 bp, homo sapiens
atttccaggagaccccaaatcccagtggggcaaagaattccttattgagaaggcggtgatctccccaggtttgatgtctttgccaaaaagaaccagggaatcctggagttctatggtga

SEQ ID NO: 19221 - DNA, 119 bp, homo sapiens
tttgatgtctttgccaaaaagaaccagggaatcctggagttctatggtgatgacatagctctgctgaagtggcccagaaagtaaagatgtccacccatgccaggtgcctggagtctggg

SEQ ID NO: 19222 - DNA, 119 bp, homo sapiens
ggagttctatggtgatgacatagctctgctgaagctggcccagaaagtaaagatgtccacccatgccagtgcctggagtctgggatgggagggtgccctgcagggaagagtgctctgga

SEQ ID NO: 19223 - DNA, 119 bp, homo sapiens
aggaacctggattctgggtaaaaggaccagcaccaacatccccttctcttgactatagagaatgaactgtgaacaaacagagtgttcctgctcattttgtcgccttgaatgggagcaaa

SEQ ID NO: 19224 - DNA, 119 bp, homo sapiens
tgaacaaacagagtgttcctgctcattttgtcgccttgaatgggagcaaactgaacattaaccttaagagggagtggaggtgagggtctcaggttggggatgctgggatccccctgtga

SEQ ID NO: 19225 - DNA, 119 bp, homo sapiens
ttctacccttctctctggttccacccctgctgcagtggacaagctgtgccgaggttgtctcccaagaaaaaccatgttccccaacttgacagatgtcagggaggtggtgacagaccagt

SEQ ID NO: 19226 - DNA, 119 bp, homo sapiens
ccctgctgcagtggacaagctgtgccgaggttgtctcccaagaaaaaaccatgttccccaacttgacagtgtcagggaggtggtgacagaccagttcctatgcagtgggacccaggagg

SEQ ID NO: 19227 - DNA, 119 bp, homo sapiens
accatgttccccaacttgacagatgtcagggaggtggtgacagaccagttcctatgcagtgggacccagaggatgagagtccctgcaagggtgagtccctcaccatgcctggattccca

SEQ ID NO: 19228 - DNA, 119 bp, homo sapiens
agttttccttgagcggagattcaggttttttcaggtgagaaggtagaagcttgcaggacccaggggttaaggatctcagccttgttggggggatgagggaggcctttgagggatctagg

SEQ ID NO: 19229 - DNA, 119 bp, homo sapiens
ggtctggtgagctggggtctttacaacccctgccttggctctgctgacaaaaactcccgcaaaagggccctcgtagcaaggtcccgccgccacgagactttcacatcaatctcttccgc

SEQ ID NO: 19230 - DNA, 119 bp, homo sapiens
gccctgccagaatctgccgcccctccatcttctacctctgaatggccacccttagaccctgtgatccatctctctcctagctgagtaaatccgggtctctaggatgccagaggcagcgc

SEQ ID NO: 19231 - DNA, 119 bp, homo sapiens
ttgacttgactcatgcttgtttcactttcacatggaatttcccagttatgaaattaataaaaatcaatgtttccacatctctcagtgcctctatctggaggccaggtagggctggcctt

SEQ ID NO: 19232 - DNA, 119 bp, homo sapiens
actgaaggggagagtcctggacctttggcagcaaagggtgggacttctgcagtttctgtttccttgactgcagctcagcggggccctcccgcttggatgttccgggaaagtgatgtggg

SEQ ID NO: 19233 - DNA, 119 bp, homo sapiens
aagccaggacacaccatcctgccccaggcccagcttctctcctgccttccaacgccatggggagcaatccagcccccaactctgcctgatgccctttatcttgggcctcttgtctggag

SEQ ID NO: 19234 - DNA, 119 bp, homo sapiens
ccaacgccatggggagcaatctcagcccccaactctgcctgatgccctttatcttgggcctcttgtctgaggtaagcgagggtaaccttcccttcctgctgtctccagcatccctcctt

SEQ ID NO: 19235 - DNA, 119 bp, homo sapiens
ggtgtgaccaccactccatggtctttggcccggccccagggatcctgctctctggagggggtagagatcaaggcggctccttccgacttctccaagagggccaggcactggagtacgtg

SEQ ID NO: 19236 - DNA, 119 bp, homo sapiens
ttctattttcaatgccatggcgccttgttctcctcacccacaggtggcaagttatggtgtgaagccaagtatggtctagtgacatatgccacataccccaaaatttgggtcaaagtgtc

SEQ ID NO: 19237 - DNA, 119 bp, homo sapiens
aggtggcaagttatggtgtgaagccaagatatggtctagtgacatatgccacataccccaaaatttgggcaaagtgtctgaagcagacagcagtaatgcagactgggtcacgaagcagc

SEQ ID NO: 19238 - DNA, 119 bp, homo sapiens
catatgccacataccccaaaatttgggtcaaagtgtctgaagcagacagcagtaatgcagactgggtcagaagcagctcaatgaaatcaattatgaaggtcagaggttagggaatggtg

SEQ ID NO: 19239 - DNA, 119 bp, homo sapiens
acacaggaagggtaccgattaccacaagcaaccatggcaggccaagatctcagtcattgtaagcacagatcccagtagtggggacttgggggaggtgaggtcaaggtgaaatgggagta

SEQ ID NO: 19240 - DNA, 119 bp, homo sapiens
gtttgtgaaagttgagctttccctctctactgttgtgtccccagcgcccttcaaagggacacgagagcttatgggggctgtggtgtctgagtactttgtgctgacagcagcacattgtt

SEQ ID NO: 19241 - DNA, 119 bp, homo sapiens
gagctgtatgggggctgtggtgtctgagtactttgtgctgacagcagcacattgtttcactgtggatgaaaggaacactcaatcaaggtcagcgtaggtaaggatgcaactgaaggtcc

SEQ ID NO: 19242 - DNA, 119 bp, homo sapiens
gggagaagcgggacctggagatagaagtagtcctatttcaccccaactacaacattaatgggaaaaaagagcaggaattcctgaattttatgactatgacgttgccctgatcaagctca

SEQ ID NO: 19243 - DNA, 119 bp, homo sapiens
gcagtctattcgtccagaggaagagctgctccctgcacaggatatcaaagctctgtttgtgtctgaggagagaaaaagctgactcggaaggaggtctacatcaagaatggggataaggt

SEQ ID NO: 19244 - DNA, 119 bp, homo sapiens
gctccctgcacaggatatcaaagctctgtttgtgtctgaggaggagaaaaagctgactcggaaggaggttacatcaagaatggggataaggtgagaaacgggcatcctaaggaggcact

SEQ ID NO: 19245 - DNA, 119 bp, homo sapiens
ctacagcttctcctctccttgcaggtgattctggcggccccttgatagttcacaagagaagtcgtttcatcaagtgagtcctccctttcctatctggggagatgccaagtggtcagcat

SEQ ID NO: 19246 - DNA, 119 bp, homo sapiens
caagatgaggatttgggttttctataaggggtttcctgctggacaggggcgtgggattgaattaaaacactgcgacaacacctgtgttccagatccttttggggcaagggagtggggaa

SEQ ID NO: 19247 - DNA, 119 bp, homo sapiens
tcccccaccccgttccagggctcggcgacacccgcgccggccctcaagcccctcccttccgcagcccacccctgggggtccacccgggctctgcaccccgcccacctccgggcttccgg

SEQ ID NO: 19248 - DNA, 119 bp, homo sapiens
tccacagacggaagggtaaacaatatagtctttttcagttcctgcatgcattgtgtttatttatgtcagaggatcaggctcccatgctgcccacccccccaccctctcccagggcttac

SEQ ID NO: 19249 - DNA, 119 bp, homo sapiens
ccgcaccgcccgcgcccgcacccaggccccggagcccagtgccaggagccgcagcagcgcgcggctaacagtagctgcggcggcccgggaccctgctcttcggtgcccgcgtccggccc

SEQ ID NO: 19250 - DNA, 119 bp, homo sapiens
ccgggaccctgctcttcggtgcccgcgtccggcccctccagggctgccaccagcagcgccggccctgccggctctcccctgcaggcctcagggccagcaccaggcccagctccgccgcc

SEQ ID NO: 19251 - DNA, 119 bp, homo sapiens
ctccctgcacaccccggggtccaggtggtcctcttggtccttccactccaggaagcccccgacttccctaggccctctcaagccaggttccccaggattacctgcctggaacacaattg

SEQ ID NO: 19252 - DNA, 119 bp, homo sapiens
ccttccactccaggaagcccccgacttccctcaggccctctcaagccaggttccccaggattacctgccggaacacaattgcacactatcaaaccagggctaagcataaagaatgtgcc

SEQ ID NO: 19253 - DNA, 119 bp, homo sapiens
atgttacataatgatttcataaagcagaatattatatattctacagctttattaatgtttttaattttttataccattactattcaccatacttacagatccctttgggccaggtaatc

SEQ ID NO: 19254 - DNA, 119 bp, homo sapiens
ggaaaatagaggacaccaagttcatgtaatgctattcatccaactgctaaatagaaaatattccaacagcatgaaaaaaaagaatatttacatatcctagttaaatattttttaaaaaa

SEQ ID NO: 19255 - DNA, 119 bp, homo sapiens
ctcccgcgcaccgaggcgggcgcggcgctgccggagggcaaggccggcaaacgcgcgccggcggcagccgggcctcgccgccggactcgccgcgggcttactcggctgagagaactgcg

SEQ ID NO: 19256 - DNA, 119 bp, homo sapiens
tggagcggcgcggatgctgcggacgccgggacgccacggctacgccgccgagttctccccgtacctgccggccgcctggcctgcgccaccgcgcagcactacggcatcgcgggtgaggc

SEQ ID NO: 19257 - DNA, 119 bp, homo sapiens
ttttatgtcacaatatcactcaataagaattcaatcttaaattttagagtttttaaaaactaggaaaaatgctttataaagtttatagattattgtgtacttttaaagtttaaaataat

SEQ ID NO: 19258 - DNA, 119 bp, homo sapiens
cacatcgtcccggagcgtcgctctgggttcgcccaccctagcgccgcaaaggacccgggacccggcaggcgaggacgtcggagccggaggagatcgatcggccccgccccctgcggccc

SEQ ID NO: 19259 - DNA, 119 bp, homo sapiens
tggcataagtgcttgtaatgtattaaaaagtaggcagagacaaatcattactctctagaaaatatttatgacacattttaattttctttccatattctgagaaataaacaaaatacaca

SEQ ID NO: 19260 - DNA, 119 bp, homo sapiens
gagacaaatcattactctctagaaaatatttattgacacattttaattttctttccatattctgagaaaaaacaaaatacacaaaatacagtaaaatgcacttttcccatttcaaataa

SEQ ID NO: 19261 - DNA, 119 bp, homo sapiens
ggggcagggaggtgccctacaggagaagccaggaggggccgcctgcccctggggtgggggccaggctgggcaggctgcagcaagaaagacctgaggcaggcgcagggcctgagagcctg

SEQ ID NO: 19262 - DNA, 119 bp, homo sapiens
ccgccccgtcgcggctccgccccgcggtaaccacgcccacacaaccgtatccccgcccacagctggcttgccttggccccgcccacaaccctctttccaagcggcggcggcggcggcgg

SEQ ID NO: 19263 - DNA, 119 bp, homo sapiens
gtccggtggttgctgttgcttggcctggtgggcccagtcctcggtgcggcgcggccaggtgggtgtccggccccgggtcggttgggacggctgcttcctagggacggggcgctcggagt

SEQ ID NO: 19264 - DNA, 119 bp, homo sapiens
atttcattagttttttaaaagtgtttttggtttgtgtatatatacatatacaaatacaacatttacaataataaaatacttgaaattctcttttgtgtctcctagtagcttcctactca

SEQ ID NO: 19265 - DNA, 119 bp, homo sapiens
caataaataaaatacttgaaattctcttttgtgtctcctagtagcttcctactcaactatttataatctattaattaaaaagttataattttagataaaaattctagtcaaatttttac

SEQ ID NO: 19266 - DNA, 119 bp, homo sapiens
ttttggaccccatattctacattttcaagtttataacaaaattaagaaattataaaatactaagtataaacttatgtcataaattgagggctatgttgaatttgaaagctgagatgata

SEQ ID NO: 19267 - DNA, 119 bp, homo sapiens
aagaaattataaaatactaagtataaaacttatgtcataaattgagggctatgttgaatttgaaagctggatgatatctttcttaataaatgaaatattataaactgcagtagaaacag

SEQ ID NO: 19268 - DNA, 119 bp, homo sapiens
agggctatgttgaatttgaaagctgagatgatatctttcttaataaatgaaatattataaactgcagtaaaacagtacatctttaccggttatttatttatttatttttatttttattt

SEQ ID NO: 19269 - DNA, 119 bp, homo sapiens
gtgcctctaatggctacatcagtacctggcacctgagtacttgttcaatgaaaggtgaagagaaaaatgactggcagtgtatttccatcatactagcaagatgtttatttaaaaacatt

SEQ ID NO: 19270 - DNA, 119 bp, homo sapiens
tttttttttttttaggaacttcatgtgtatgtctaccaggatttcagatgatctctaataatggaggactgctattatttgtaaaaagtgcccagaaaacatggtgcgcataatttatt

SEQ ID NO: 19271 - DNA, 119 bp, homo sapiens
agatgatctctaataatggaggacctgctattatttgtaaaaagtgcccagaaaacatggtgcgcataattattttaaaataacttacctgtaaaaagtagtaagttaaatatctttat

SEQ ID NO: 19272 - DNA, 119 bp, homo sapiens
tttttataacaaaaataagtttgtatcatataatttcagtatagctaatttgttttgttttaaatatcagtttctttctcagtcacatatgaaatggatcatggagaagcacatgtcca

SEQ ID NO: 19273 - DNA, 119 bp, homo sapiens
tttgttttaaatatcaggtttctttctcagtcacatatgaaatggatcatggagaagcacatgtccagaagatgtaagtttattttaaccttttaaaatatatacagtgtattttataa

SEQ ID NO: 19274 - DNA, 119 bp, homo sapiens
atttttcccaatatcattttttatacattttaattacttaatgttttaagagttctcttccagagttttcttttcaattacgtttaaagactgtaaataacaaacagtaaggctgggcg

SEQ ID NO: 19275 - DNA, 119 bp, homo sapiens
tacaggtgtcagccactacacatggccaggattagtttcttagaatgtgcttttaacattgagtaaacttgaatgctggaatttttatttttagtttaaaatatctgccccaaaatata

SEQ ID NO: 19276 - DNA, 119 bp, homo sapiens
caggattagtttcttagaatgtgcttttaacattgagtaaactatgaatgctggaatttttatttttagttaaaatatctgccccaaaatatatttttttcttgctaataaattaataa

SEQ ID NO: 19277 - DNA, 119 bp, homo sapiens
tcttgctaataaattaataatatgatattaaaactcagattactgatctcaataactgaccaatgaaaatctgagcctgccttcttcctcagccacccccagctctgccaggaagaggc

SEQ ID NO: 19278 - DNA, 119 bp, homo sapiens
ctgtctcaaaaaaaaaaaacatcaaaatgatttcaaattaatgtccatccaaatgaatattttactataaataaaagaagtaaataatacagagtaattatttattacttattcatttc

SEQ ID NO: 19279 - DNA, 119 bp, homo sapiens
atattaaaaaattttttttcttaattcttgagtatgatcgatggttttctttttctttctttaaaataaaataggatgaccatgaaagctgtggttctaattctaccaaccgtagtact

SEQ ID NO: 19280 - DNA, 119 bp, homo sapiens
gtgcctggccctttataaattatgttataatttcatgtaatacataattgtatagtcaaaatggctcactattaaatattctttatacaaggaagtctcaaagagaaattacatttgaa

SEQ ID NO: 19281 - DNA, 119 bp, homo sapiens
cataattgtatagtcaaaatggctcacatattaaatattctttatacaaggaagtctcaaagagaaattcatttgaaatagtttattctaaaaagttttcaaatacttcagttacagaa

SEQ ID NO: 19282 - DNA, 119 bp, homo sapiens
atgtatgcgacaaggaggctaaccccatgctcttgttccctcaggtaccctcacatccatcaccaacctgccacaagcctggcccggaacatggaccggctctcactggatgaggagca

SEQ ID NO: 19283 - DNA, 119 bp, homo sapiens
gaccggctctcactggatgaggagcactacaaccggcaggaggagtggcggcggcagctccccgagagctgggcgaggggcttcgacagggcctgtcccggctgggcatcagcctgctt

SEQ ID NO: 19284 - DNA, 119 bp, homo sapiens
aggagtggcggcggcagctccccgagagcctgggcgaggggcttcgacagggcctgtcccggctgggcacagcctgcttggtaaggggctgcggggcctcccacctgtctgtactccag

SEQ ID NO: 19285 - DNA, 119 bp, homo sapiens
aactaccaatgtaaaagaagtatgacaagggtttttcatgtttatttagcaagttaaatgctgtttttatgatgatagaaagcaaataagatactcctcaaaatcaaagaaaataatta

SEQ ID NO: 19286 - DNA, 119 bp, homo sapiens
aaaaataaagactgtccaaagggattctcctagcttataacacatttccagaataactctcaaaaaaaaaaattcaaaaatactcattgactaccttaaaaatatgtcaataccgtatg

SEQ ID NO: 19287 - DNA, 119 bp, homo sapiens
ccgcaaagctgacctgactgccccgtcacaccatgcccggggctcccccagccgggcgcccgttcctctgggctgggggaccccaaagtcagaagttggggcggagggcgctctagtcc

SEQ ID NO: 19288 - DNA, 119 bp, homo sapiens
ccccaaagtcagaagttggggcggagggcgctctagtcccagagcactccggggagtggcagccggtgagcggcgcgggcgtccgacaaggggtgcggggcatgtccggggcagccccg

SEQ ID NO: 19289 - DNA, 119 bp, homo sapiens
tccgacaaggggtgcggggcatgtccggggcagccccgggatgcagccgcccggggagcctccgcgccttgcgccgcccggccgcaagcccggactttgcgaactgttgagccacccgg

SEQ ID NO: 19290 - DNA, 119 bp, homo sapiens
ccccgccttcccgcccgcgtcgctccgcgcggggcccgcgccctcaccgtctcccagcggatgccctggcggccctccactgcgagggcacggacgccacacccagggtctcgtcctgc

SEQ ID NO: 19291 - DNA, 119 bp, homo sapiens
gtggaaccccacgatgacagggaccctcttagctcatgggacgacggcacgacccccaggcccaaggggaaggtgagcgggagaacactgacttgtctcgccccggcctcactttcacc

SEQ ID NO: 19292 - DNA, 119 bp, homo sapiens
tctgtacaagacgcggtcctttgggaagattgcagaggcaggaggtccagttacttgtgaggagccgtgggcgtggcccgctcacctccctgctgttctcaagcgccccccacaaggaa

SEQ ID NO: 19293 - DNA, 119 bp, homo sapiens
tcacctctcctcatctccctccatgcccgcccccccaggccctcacctttccgcatctcccggatgagcggtcgtgctgcagcagcgccggcacgtccaccaccaggccctggcacagg

SEQ ID NO: 19294 - DNA, 119 bp, homo sapiens
ccctgggcaggcactgcagggcctgcagccgccctacctgtcagaacagccctcctggaccccgatgactacaggtcctgggcatagtcggcctcggctgggagcaggaactcgtccag

SEQ ID NO: 19295 - DNA, 119 bp, homo sapiens
cccgatgacatacaggtcctgggcatagtcggcctcggctgggagcaggaactcgtccaggctgggcggagctcctggaaggagggagcatgtggtgggccggctcctcccgaaacctg

SEQ ID NO: 19296 - DNA, 119 bp, homo sapiens
tgacgggaggaccccaagctcagggccaggcacaggacacatccctgggggtctgggccaggtccccaggacaatagcaaaacccatggaatgtcaggagctgcccccagccccaagca

SEQ ID NO: 19297 - DNA, 119 bp, homo sapiens
gggcgctgcacccgccaggccctccctacctgctgcggacgtccttgctgcggatgggcgccaggaggcgaaggaggatttggccgagcgaagggaacagtcgtcgcaggccagggggc

SEQ ID NO: 19298 - DNA, 119 bp, homo sapiens
ctggccaccccagagagagggttaccccccgaggacgggctccctctctcactgctcaggaccccgcggacttggggatttcctgcaaggaggtgctcaggcagggcggggagcagctg

SEQ ID NO: 19299 - DNA, 119 bp, homo sapiens
caaaatagatttgtcctgtgtcctaaggccagggataagtccccccaccccccccccccacccccaacacctgtgtgatgtgtttatatttgagagaagattgggcggggaaaagcatt

SEQ ID NO: 19300 - DNA, 119 bp, homo sapiens
gctgaggcaggcatcaggcacacttgctgacgcactccagcagctccatccggatggcaatgcggacgtccagcccagcgggatgaggcggatgaagcgggagatgatggggggccgca

SEQ ID NO: 19301 - DNA, 119 bp, homo sapiens
cgtgccagcccagcgggatgaggcggatgaagcgggagatgatggggggccgcagcaggttctgaaccgggaggtgcggtccgagttgccatagaagacctagagagatagaggaaatc

SEQ ID NO: 19302 - DNA, 119 bp, homo sapiens
ccatatgaaaagtaaaacaaacaattgaattcaaaaggatcaaaaaagacaattcatttcacttacctttttgtttttttcatgtctttgcttggtgttgtttcactgttttctaggat

SEQ ID NO: 19303 - DNA, 119 bp, homo sapiens
actaaattaattttaaagtgtaatttttctccctaaaacgtttcttacatgaataacaataatgatagatgaatctgtgagaatgaaaagaatttaagagttagaagggactgcagtta

SEQ ID NO: 19304 - DNA, 119 bp, homo sapiens
ttctttccaaaaaccatccaaaaaattaacttaaactgctctcaccaacaataacgaaaataaatcttctattataccttttgtttctgaactggtgataattttaatgacttttcatt

SEQ ID NO: 19305 - DNA, 119 bp, homo sapiens
actccccaccaccctgtccccgcagcggtggtcctcggcctgcccagcgcctgggccgtgggggcctgccccgcgcttgtcccgccgcctgcgcctgcagcaccgtggagcgcggctgc

SEQ ID NO: 19306 - DNA, 119 bp, homo sapiens
cgtgggggcctgcgcccgcgcttgtcccgccgcctgcgcctgcagcaccgtggagcgcggctgctcggtcgctgcgaccgcgcgggcctcctgcgggtgccggccgagctcccgtgcga

SEQ ID NO: 19307 - DNA, 119 bp, homo sapiens
gcctgcgcctgcagcaccgtggagcgcggctgctcggtgcgctgcgaccgcgcgggcctcctgcgggtgcggccgagctcccgtgcgaggcggtctccatcgacctggaccggaacggc

SEQ ID NO: 19308 - DNA, 119 bp, homo sapiens
acgcgcacctggagcgcggccgcatcgaggcggtggcctccagctcgctgcagggcctgcgccgcctgcctcgctcagcctgcaggccaaccgcgtccgtgccgtgcacgctggcgcct

SEQ ID NO: 19309 - DNA, 119 bp, homo sapiens
gaggcggtggcctccagctcgctgcagggcctgcgccgcctgcgctcgctcagcctgcaggccaaccgctccgtgccgtgcacgctggcgccttcggggactgtggcgtcctggagcat

SEQ ID NO: 19310 - DNA, 119 bp, homo sapiens; identical to SEQ ID NO: 4895

SEQ ID NO: 19311 - DNA, 119 bp, homo sapiens
taaaatgtattttcatgtttaaaatgtttttggatatttttgggttaataactactacattgaattgcagttaaggtgcagaaataatacattaaaagattttcactttaaattaatta

SEQ ID NO: 19312 - DNA, 119 bp, homo sapiens
ttgggttaataactactacattgaattgcatgttaaggtgcagaaataatacattaaaagattttcacttaaattaattagtaatattgagcgctcaccctgtgcgtggccttgtgcta

SEQ ID NO: 19313 - DNA, 119 bp, homo sapiens
aaaaattggtaattttattaagttatatgtgtttaaatattatattagcttatttctcttgcattaatatactgctgtttttgttttgcttctttatatttatgtctagcttttatatg

SEQ ID NO: 19314 - DNA, 119 bp, homo sapiens
atattatattagcttatttctcttgcattaatagtactgctgtttttgttttgcttctttatatttatgctagcttttatatgtaatttatctagtgtttataaaatgtgatttgtaat

SEQ ID NO: 19315 - DNA, 119 bp, homo sapiens
tatatttatgtctagcttttatatgtaatttatctagtgtttataaaatgtgatttgtaataaatgttgtaaaatgaaaatggctgcaatggtttgtatatggtctgtttgtccccacc

SEQ ID NO: 19316 - DNA, 119 bp, homo sapiens
tggtcatgcatccgtgcaaatggtcagtttgatcagtgatcctggccccaggggcagggcagggcctggtcctgtgggtttgggtggggtggggttaccttgagtcccttggccctgtt

SEQ ID NO: 19317 - DNA, 119 bp, homo sapiens
tgtcccctcagctcctagctcccagccaaaggctcacatggttgcggaaggagtgggctcggatggggtctcagcggccagggacacactgctgaggatgatgaacaccaggataagat

SEQ ID NO: 19318 - DNA, 119 bp, homo sapiens
ggggtcctcagcggccagggacacactgctgaggatgatgaacaccaggataagattggtgaagacatgtggtggatgagggtgtggcagcccttcctcagcctgtggagagggagtgg

SEQ ID NO: 19319 - DNA, 119 bp, homo sapiens
atgaggatgtcgaagggcctcaggtggacacagtcaaggaccctggcagagtggcattggaacccccctctcccttgggaacctcccacccagtgctgacccttgacgcccaaggtgac

SEQ ID NO: 19320 - DNA, 119 bp, homo sapiens
tatttttactggtctgtaagactataaaatactactttaaaaaagaaattttcatttaaaaagcttaatcaataaaaacactgtgatctattttgtttggaagttgactgacagcaagc

SEQ ID NO: 19321 - DNA, 119 bp, homo sapiens
tggctcactaaatcagagcaagcatattaaaatagtaagaaatgtcaaataattggagagcactacttatgaaaaaaatacctttatattcatcaggatatttctcatattccatacaa

SEQ ID NO: 19322 - DNA, 119 bp, homo sapiens
agacatctgctctggaacacggaacctgaaaaatattatgattttaagttaagaaactgcttcctaatgtataactattccaaattacacttttttcccctttacatataacaggatta

SEQ ID NO: 19323 - DNA, 119 bp, homo sapiens
cgtattaaatttaatgttgaaatgatcatgaaaacctttaagttgaataatacttcagaatactttttaataagtcatggtaatcaaaaaataactatcctatatatttatattagaat

SEQ ID NO: 19324 - DNA, 119 bp, homo sapiens
aatacataatatataaatacaccctatatatttatattagaatacatatattagaattatattgcccaatactttgacgtattttccaagcagtggtaatgggtttgcactaatccatt

SEQ ID NO: 19325 - DNA, 119 bp, homo sapiens
gccgcctcccacaccttggcgccggtgcttcgttcccggagtcggcgggttccactccccggaccccgcatcccgtaaccccgcaaccctgccgttgcgcccagccttgcgccttgaga

SEQ ID NO: 19326 - DNA, 119 bp, homo sapiens
cccggaccccgcaatcccgtaaccccgcaaccctgccgttgcgcccagccttgcgccttgagatcgcaggcttacagcccagagccgaggtgccgttgagatgttactccaaaaagaaa

SEQ ID NO: 19327 - DNA, 119 bp, homo sapiens
gccttgcgccttgagatcgcagggcttacagcccagagccgaggtgccgttgagatgttactccaaaaaaaaagaaaggagaaaaggaagttacttcagaccacgtgatccattccgtg

SEQ ID NO: 19328 - DNA, 119 bp, homo sapiens
cacctctcctttccccctccttctccatccctgtaaaataaatgtaatttatctttgccaaaaccaacaagtcacagaggctttcactgcagtgtgggacgacctgagcctctgcgtgt

SEQ ID NO: 19329 - DNA, 119 bp, homo sapiens
aaatgtaatttatctttgccaaaaccaacaaagtcacagaggctttcactgcagtgtgggacgacctgacctctgcgtgtgcaggcactgggtctcgagagggtgcaagggggataaag

SEQ ID NO: 19330 - DNA, 119 bp, homo sapiens
ggcttagggggcgcccggaccggccgcgcgtccgtggggaacgcatcgctgcgccgcgcgccgcgggcatcgggacgccgccgctgctgttcgcgctggtgctgccgccggtgctgccg

SEQ ID NO: 19331 - DNA, 119 bp, homo sapiens
ctgcccttcctctcagggcccgcgggccgcccccatgcagcggcgcgggccctgggcagcccccggcccggccccggcgcccagctcaggccgctcccgccgccgccgccgcttccatt

SEQ ID NO: 19332 - DNA, 119 bp, homo sapiens
ggcggcggcagagccagagcaacatggcgccggtgggcgggggcgggcgcccggtcggcggaccggccccgggcgcctcctcctggcggcgccggtgctgctggtgctgctgtgggcgc

SEQ ID NO: 19333 - DNA, 119 bp, homo sapiens
tattaaaaattacaaatacgttagtaaataataaagaaattaagaaagatattaacttaaattttaaaaattttaccttttcaccagcaacaccctttgcaccaggaattccaggtaca

SEQ ID NO: 19334 - DNA, 119 bp, homo sapiens
tatatatatatatatatgtatatatatatgaatatatatatgaatatatatatatgaatatatatatataatatatatatatatatatatgaaggttacttatatcatccttactttct

SEQ ID NO: 19335 - DNA, 119 bp, homo sapiens
atcatcatgacacagcaagaatcttatcagaccaatggggaagtcagcccagaaatgttctgaggaaagggaggcgggggccgctgggtcatccctcccacaggcccatcattgggatg

SEQ ID NO: 19336 - DNA, 119 bp, homo sapiens
tgaggaaaggggaggcgggggccgctgggtcatccctcccacaggcccatcattgggatgcgtcctgaagcccatcaagcccatggcccttgtgatccaggtggggaaactaaggccca

SEQ ID NO: 19337 - DNA, 119 bp, homo sapiens
taaggcccagagaagtgaggaccccgcagactatcaatcccagtctcttcccctcactccctgtgaagcctccagcatcatcgaggtcccatcaggtggggaaagatgctgttccaggc

SEQ ID NO: 19338 - DNA, 119 bp, homo sapiens
ctgtgaagctctccagcatcatcgaggtcccatcaggtggggaaagatgctgttccaggcgcacactagctacaaggccagagctttctggaagggggcagtaagtacctcggctccct

SEQ ID NO: 19339 - DNA, 119 bp, homo sapiens
gcacactagtctacaaggccagagctttctggaagggggcagtaagtacctcggctccctttctggtagggtgggagtcctgagaaggcaggaagtggcccacttggtaactctgaggt

SEQ ID NO: 19340 - DNA, 119 bp, homo sapiens
agtctcttcttgattcctcccccggagagggcggggcggccgagcgccccgaggctagacgccgccgtcgagagacgagggggcgtgtaggcggtgacgccctgcaaagtggccggcgt

SEQ ID NO: 19341 - DNA, 119 bp, homo sapiens
gccgccgtccgagagacgagggggcgtgtaggcggtgacgccctgcaaagtggccggcgtgcttatcataccgagcttccgcgggcctgcagagcctggcggactcagacttctctccg

SEQ ID NO: 19342 - DNA, 119 bp, homo sapiens
gcttatcattaccgagcttccgcgggcctgcagagcctggcggactcagacttctctccggagcgggatcggccctaccgcggcctcacacttctcgccggcttcccgagttctcgggg

SEQ ID NO: 19343 - DNA, 119 bp, homo sapiens
gagcgggatgcggccctaccgcggcctcacacttctcgccggcttcccgagttctcgggggcggggctttgtttttacttccggatcccacagctatgacaccggaagccggaagcgtg

SEQ ID NO: 19344 - DNA, 119 bp, homo sapiens
gcggggcttgtgtttttacttccggatcccacagctatgacaccggaagccggaagcgtggtagggaaggcgaccgcgaaactgggactttctcggagcgccggggccctaccagcgtt

SEQ ID NO: 19345 - DNA, 119 bp, homo sapiens
gtagggaagggcgaccgcgaaactgggactttctcggagcgccggggccctaccagcgttcacagtccgcgctcccacccttctcacgtctgacggactctgctgacaggtgtggtcct

SEQ ID NO: 19346 - DNA, 119 bp, homo sapiens
ttcaggctcccccctcttttttgggccccagcccgttcctgctccgcgcttctggagcactggccaagggggccgattcaggacccaggttacttgggcggcgagctggactgtttcta

SEQ ID NO: 19347 - DNA, 119 bp, homo sapiens
tggccaaggcgggccgattcaggacccaggttacttgggcggcgagctggactgtttctactcctccctctcctccactgcggggtctgaccctactccttgtgtgaggactcctctag

SEQ ID NO: 19348 - DNA, 119 bp, homo sapiens
ctcctccctcctcctccactgcggggtctgaccctactccttgtgtgaggactcctctagttcagagactattctgttcaccaaacttgactgcgctctatcgaggtcgttaaattctt

SEQ ID NO: 19349 - DNA, 119 bp, homo sapiens
ttcagagacatattctgttcaccaaacttgactgcgctctatcgaggtcgttaaattcttcggaaatgctcacatatagtttggcagctaggtatctgatttcatatgcctgtttgctc

SEQ ID NO: 19350 - DNA, 119 bp, homo sapiens
tgctgcctttctctttcagcccttgccctgttggatgaataggcacctctggaagagccaactgtgtgaatggtgcagcccagtggtggcccggcagcagatcaggacgtactgggcga

SEQ ID NO: 19351 - DNA, 119 bp, homo sapiens
actgtgtgagatggtgcagcccagtggtggcccggcagcagatcaggacgtactgggcgaagagtctccctggggaagccagccatgctgcacctgccttcagaacagggcgctcctga

SEQ ID NO: 19352 - DNA, 119 bp, homo sapiens
agagtctcctctggggaagccagccatgctgcacctgccttcagaacagggcgctcctgagaccctccacgctgcctggaggagaatcaagagctccgaggtgaggaaagagtcagggg

SEQ ID NO: 19353 - DNA, 119 bp, homo sapiens
ccctctgccaccagatgccatccggcagagcaaccagattctgcgggagcgctgcgaggagcttctgcattccaagccagccagagggaggagaaggagttcctcatgtgcaagttcca

SEQ ID NO: 19354 - DNA, 119 bp, homo sapiens
gcttctgcatttccaagccagccagagggaggagaaggagttcctcatgtgcaagttccaggaggccagaaactggtggagagactcggcctggagaagctcgatctgaagaggcagaa

SEQ ID NO: 19355 - DNA, 119 bp, homo sapiens
ggaggccaggaaactggtggagagactcggcctggagaagctcgatctgaagaggcagaaggagcaggcctgcgggaggtggagcacctgaagagatgccagcaggtagtcggggcagg

SEQ ID NO: 19356 - DNA, 119 bp, homo sapiens
tccccccgttcgtcctccctgagtctgctctttccccgtgccagggcccgggcggccagcgagcaggcgggcagctggagagtgagcgcgaggcgctgcagcagcagcacagcgtgcag

SEQ ID NO: 19357 - DNA, 119 bp, homo sapiens
gagcaggcgcggcagctggagagtgagcgcgaggcgctgcagcagcagcacagcgtgcaggtggaccagtgcgcatgcagggccagagcgtggaggccgcgctccgcatggagcgccag

SEQ ID NO: 19358 - DNA, 119 bp, homo sapiens
gtggaccagctgcgcatgcagggccagagcgtggaggccgcgctccgcatggagcgccaggccgcctcgaggagaagtgagtcagcgggggcggggccgcaccgcagggtctgtggttc

SEQ ID NO: 19359 - DNA, 119 bp, homo sapiens
tcgccctgggctgacgaggctccgtcagctccccttgcccgtccttagggaatgcagctggaagatctcaacagcagctccagcaggccgaggaggccctggtggccaaacaggaggtg

SEQ ID NO: 19360 - DNA, 119 bp, homo sapiens
gaagatctcaaacagcagctccagcaggccgaggaggccctggtggccaaacaggaggtgatcgataagtgaaggaggaggccgagcagcacaagattgtgatggagaccgttccggtg

SEQ ID NO: 19361 - DNA, 119 bp, homo sapiens
atcgataagctgaaggaggaggccgagcagcacaagattgtgatggagaccgttccggtgctgaaggccaggtgagggccctcctctctgacccaccctggcactgggacctggagagt

SEQ ID NO: 19362 - DNA, 119 bp, homo sapiens
tgggtggctggcttgtggcgggcacatccctttctgttggatttgccaggcggatatctacaaggcggattccaggctgagaggcaggcccgggagaagctggccgagaagaaggagct

SEQ ID NO: 19363 - DNA, 119 bp, homo sapiens
caaggcggacttccaggctgagaggcaggcccgggagaagctggccgagaagaaggagctcctgcaggacagctggagcagctgcagagggagtacagcaaactgaaggccagctgtca

SEQ ID NO: 19364 - DNA, 119 bp, homo sapiens
cctgcaggagcagctggagcagctgcagagggagtacagcaaactgaaggccagctgtcaggagtcggcaggtgggcctctgagagcgtgcccgtgtgagcagtgggtgcgacactggg

SEQ ID NO: 19365 - DNA, 119 bp, homo sapiens
tgctgtcccaagtgccagtatcaggcccctgatatggacaccctgcagatacatgtcatggagtgcattagtagggccggccagtgcaaggccactgcctgccgaggacgtgcccggga

SEQ ID NO: 19366 - DNA, 119 bp, homo sapiens
gagtgcattgagtagggccggccagtgcaaggccactgcctgccgaggacgtgcccgggaccgtgcagttgcgctttcctctcccgcctgcctagcccaggatgaagggctgggtggcc

SEQ ID NO: 19367 - DNA, 119 bp, homo sapiens
ccgtgcagtctgcgctttcctctcccgcctgcctagcccaggatgaagggctgggtggccacaactgggtgccacctggagccccacccaggagctggccgcggcaccttacgcttcag

SEQ ID NO: 19368 - DNA, 119 bp, homo sapiens
acaactgggatgccacctggagccccacccaggagctggccgcggcaccttacgcttcagctgttgatcgctggtcccctcttttggggtagatgcggccccgatcaggcctgactcgc

SEQ ID NO: 19369 - DNA, 119 bp, homo sapiens
ctgttgatccgctggtcccctcttttggggtagatgcggccccgatcaggcctgactcgctgctcttttgttcccttctgtctgctcgaaccacttgcctcgggctaatccctccctct

SEQ ID NO: 19370 - DNA, 119 bp, homo sapiens
tgctctttttgttcccttctgtctgctcgaaccacttgcctcgggctaatccctccctcttcctccaccggcactggggaagtcaagaatggggcctggggctctcagggagaactgct

SEQ ID NO: 19371 - DNA, 119 bp, homo sapiens
tcctccacccggcactggggaagtcaagaatggggcctggggctctcagggagaactgcttcccctggcgagctgggtggcagctcttcctcccaccggacaccgacccgcccgctgct

SEQ ID NO: 19372 - DNA, 119 bp, homo sapiens
tcccctggcagagctgggtggcagctcttcctcccaccggacaccgacccgcccgctgctgtgccctggagtgctgccctcttaccatgcacacgggtgctctccttttgggctgcatg

SEQ ID NO: 19373 - DNA, 119 bp, homo sapiens
gtgccctgggagtgctgccctcttaccatgcacacgggtgctctccttttgggctgcatgctattccatttgcagccagaccgatgtgtatttaaccagtcactattgatggacatttg

SEQ ID NO: 19374 - DNA, 119 bp, homo sapiens
catttgggttgtttcccatctttttgttaccataaataatggcatagtaaaaatccttgtgcattagtctgcgtatctttggcatagattctgagaagtgacaccactgagcatgggcg

SEQ ID NO: 19375 - DNA, 119 bp, homo sapiens
gcattagtcgtgcgtatctttggcatagattctgagaagtgacaccactgagcatgggcgatggcgtagtggtacctgagcccccttcctccttggagcttggtttcccatctctcccc

SEQ ID NO: 19376 - DNA, 119 bp, homo sapiens
gcagatggctgaggacaaggcctctgtgaaagcccaggtgacgtccttgctcggggagctgcaggagagcagagtcgcttggaggctgccactaaggaatgccaggctctggagggtcg

SEQ ID NO: 19377 - DNA, 119 bp, homo sapiens
ccctttcctcaggaggaagctggcccagttgcaggtggcctatcaccagctcttccaagaatacgacaacacatcaagagcagcgtggtgggcagtgagcggaagcgagtgagtgcgac

SEQ ID NO: 19378 - DNA, 119 bp, homo sapiens
gcttgactggacggtttctgttttcaaaggatcgaggacatgaggaagcggcatgtcgaggtctcccagcccccttgccccccgcccctggtgagtgagcgagaactgggcctgcggga

SEQ ID NO: 19379 - DNA, 119 bp, homo sapiens
tgcaaaaatcacaacgaatgagaggcgtgaggttttcggtgtagcagacatttaattcttatttgccaatcctgagctaggacctgggaacacaaagttaaataggacacgattctagt

SEQ ID NO: 19380 - DNA, 119 bp, homo sapiens
atttgccaactcctgagctaggacctgggaacacaaagttaaataggacacgattctagtcctctaggcccaacggtcttggaaaggaaggcagacaagtaaactggccatttcaatac

SEQ ID NO: 19381 - DNA, 119 bp, homo sapiens
cctctaggcaccaacggtcttggaaaggaaggcagacaagtaaactggccatttcaatactacgtggtcttacaatgctagaggtaggcacagggggcgcagtgcaagggaggaagggc

SEQ ID NO: 19382 - DNA, 119 bp, homo sapiens
tacgtggtcgttacaatgctagaggtaggcacagggggcgcagtgcaagggaggaagggcgttaacatcgccacctacttccaggtgccaagcactgttatcaacattattccacttta

SEQ ID NO: 19383 - DNA, 119 bp, homo sapiens
gttaacatctgccacctacttccaggtgccaagcactgttatcaacattattccactttattccctggtattatgaaaggcaggtattgatattcacacttaacagacgaggaaacagc

SEQ ID NO: 19384 - DNA, 119 bp, homo sapiens
ttccctggtgattatgaaaggcaggtattgatattcacacttaacagacgaggaaacagcctcagggagtaagcttacttgacccagtctctctcctagtccatatcagaaccaagatt

SEQ ID NO: 19385 - DNA, 119 bp, homo sapiens
ctcagggagataagcttacttgacccagtctctctcctagtccatatcagaaccaagattcaaacaggtttgtttagaaaatctaggatttttcagccataccaaaataaagtagcctc

SEQ ID NO: 19386 - DNA, 119 bp, homo sapiens
caaacaggttttgtttagaaaatctaggatttttcagccataccaaaataaagtagcctcagggaatcaaacattcacgaaagaaggtgacttctgaactgagtcttgcaagaattctg

SEQ ID NO: 19387 - DNA, 119 bp, homo sapiens
agggaatcaaaacattcacgaaagaaggtgacttctgaactgagtcttgcaagaattctggaaattaactggcagttgtatcaggggtggtaaggggacggaacagcttgagcaagagt

SEQ ID NO: 19388 - DNA, 119 bp, homo sapiens
gaaattaacctggcagttgtatcaggggtggtaaggggacggaacagcttgagcaagagtgagagttcctggggtttggggagggaggaggaaaaatgattttttacttaagaacaaat

SEQ ID NO: 19389 - DNA, 119 bp, homo sapiens
gagagttccttggggtttggggagggaggaggaaaaatgattttttacttaagaacaaatagcaaggaagtttgtgagctatgattgggggctggaggggaaagcctgaattctatcca

SEQ ID NO: 19390 - DNA, 119 bp, homo sapiens
agcaaggaaggtttgtgagctatgattgggggctggaggggaaagcctgaattctatccagtaatccttaagggttttcatccaagtggcctgatgggatttgcattttactctggaag

SEQ ID NO: 19391 - DNA, 119 bp, homo sapiens
gtaatccttgaagggttttcatccaagtggcctgatgggatttgcattttactctggaagatgacttgggattggcaggaagtaaggacactttttttcaagagaatatagccctaaac

SEQ ID NO: 19392 - DNA, 119 bp, homo sapiens
atgacttggggattggcaggaagtaaggacactttttttcaagagaatatagccctaaactaaggtagtgcagtggggatataagtggataagttctagatatacttgggaaatataat

SEQ ID NO: 19393 - DNA, 119 bp, homo sapiens
taaggtagtagcagtggggatataagtggataagttctagatatacttgggaaatataattggaaggactgtggactgataaagatatatttaagatgtgcagtcagtaggacttgttg

SEQ ID NO: 19394 - DNA, 119 bp, homo sapiens
tggaaggacttgtggactgataaagatatatttaagatgtgcagtcagtaggacttgttgattgaggactgttgattgaaggtggggtgaaaagatgacacaggtttctggcttggttg

SEQ ID NO: 19395 - DNA, 119 bp, homo sapiens
attgaggacttgttgattgaaggtggggtgaaaagatgacacaggtttctggcttggttggaaaaagcaagcatcatttaccaagaagaaacgagatggaattgtttggggttgggaag

SEQ ID NO: 19396 - DNA, 119 bp, homo sapiens
gaaaaagcatagcatcatttaccaagaagaaacgagatggaattgtttggggttgggaaggtggacgataaatgttgagtatcacgcatcttacatttgaggtatcaatcattattgga

SEQ ID NO: 19397 - DNA, 119 bp, homo sapiens
gtggacgatgaaatgttgagtatcacgcatcttacatttgaggtatcaatcattattggatagaaagtctatttagtgagatggtaatggttgtagatgtcagtgatttgttccagggg

SEQ ID NO: 19398 - DNA, 119 bp, homo sapiens
tagaaagtcttatttagtgagatggtaatggttgtagatgtcagtgatttgttccaggggacaatgagtaactgagaagagcaaaaatctacaaatggagcaatgaaggtcagcattcc

SEQ ID NO: 19399 - DNA, 119 bp, homo sapiens
acaatgagtaaactgagaagagcaaaaatctacaaatggagcaatgaaggtcagcattccatgaagaagagaaattgatgagagaggaagacaagagtagtcagagaagttaagacctg

SEQ ID NO: 19400 - DNA, 119 bp, homo sapiens
atgaagaagcagaaattgatgagagaggaagacaagagtagtcagagaagttaagacctggaagctaagaaggagagggagtgggcaactatgatggaaaggccataaagcaaagattg

SEQ ID NO: 19401 - DNA, 119 bp, homo sapiens
gaagctaagtaaggagagggagtgggcaactatgatggaaaggccataaagcaaagattgagaagtatgactggaggccattgtttctggatgtcagggtaggaaagagtaaacggtga

SEQ ID NO: 19402 - DNA, 119 bp, homo sapiens
agaagtatgcactggaggccattgtttctggatgtcagggtaggaaagagtaaacggtgacagtagaggctccttgcagtgaattggggaatgaatatcaagtgaaatagtgcacagag

SEQ ID NO: 19403 - DNA, 119 bp, homo sapiens
cagtagaggtctccttgcagtgaattggggaatgaatatcaagtgaaatagtgcacagagtctgtatacaccctttggaaaagcctgattgaaaagagaaagatgagatgcggagggag

SEQ ID NO: 19404 - DNA, 119 bp, homo sapiens
tctgtatacaaccctttggaaaagcctgattgaaaagagaaagatgagatgcggagggagaggcattcaaaaatgctagttacagcatcttattgaggaatctaaggcaggagtaggga

SEQ ID NO: 19405 - DNA, 119 bp, homo sapiens
aggcattcaaaaaatgctagttacagcatcttattgaggaatctaaggcaggagtagggagacctgagttgatggagcatggtagggttgggagtcaagtcaagctcacagcatttcag

SEQ ID NO: 19406 - DNA, 119 bp, homo sapiens
gacctgagtatgatggagcatggtagggttgggagtcaagtcaagctcacagcatttcagggttagggaataagctgtctgcagcagtcaatagttgagggttcagcagggcttccaac

SEQ ID NO: 19407 - DNA, 119 bp, homo sapiens
ggttagggagataagctgtctgcagcagtcaatagttgagggttcagcagggcttccaacagggcagaaaagggactgaactgccagcttcagggcaggggacaagccatctctcctga

SEQ ID NO: 19408 - DNA, 119 bp, homo sapiens
agggcagaataagggactgaactgccagcttcagggcaggggacaagccatctctcctgataggaaaggtcaggggttgagtagagtcttcagcaaagctgggaagttgggtgttcccc

SEQ ID NO: 19409 - DNA, 119 bp, homo sapiens
taggaaagggtcaggggttgagtagagtcttcagcaaagctgggaagttgggtgttccccagcctgttaaggatcccagccaggaccagagcagaaaccctggccctctacctcttcat

SEQ ID NO: 19410 - DNA, 119 bp, homo sapiens
agcctgttacaggatcccagccaggaccagagcagaaaccctggccctctacctcttcatccagacaggctcatggcagccacgggttacctagggaggaggctggcatcagatctggg

SEQ ID NO: 19411 - DNA, 119 bp, homo sapiens
ccttagcactccccatagttgtttgaaaacgtccacacccttcccttccatacttacatcaaagagtccgccccatgctgctggtagagccttgggttgagaaagccaagaggggggcg

SEQ ID NO: 19412 - DNA, 119 bp, homo sapiens
aaagagtcctgccccatgctgctggtagagccttgggttgagaaagccaagaggggggcggccactaagatcctgtgctcattgatcaaggataggatccccccaaacactggagtaga

SEQ ID NO: 19413 - DNA, 119 bp, homo sapiens
gccactaaggatcctgtgctcattgatcaaggataggatccccccaaacactggagtagaggcctacaaagtgaaggtgcaagtagaggtcaggggttctgagtgattggactttttgg

SEQ ID NO: 19414 - DNA, 119 bp, homo sapiens
gtagttcctgagtgagagtttggagatgggctgattctcaccgaggttccggacacccatggaatgggcctctgttgctgaccacccagtagccatcagaaagtgcagccacatctggg

SEQ ID NO: 19415 - DNA, 119 bp, homo sapiens
ggaatgggcactctgttgctgaccacccagtagccatcagaaagtgcagccacatctgggtaggcacggcactggcattgaagtaactggatggtggcaggtgggggctagagctcagg

SEQ ID NO: 19416 - DNA, 119 bp, homo sapiens
taggcacggccactggcattgaagtaactggatggtggcaggtgggggctagagctcaggaacttcgttcagcttcctcctgaaaggcatttttgagtgagtattggcatgtggcctgc

SEQ ID NO: 19417 - DNA, 119 bp, homo sapiens
ttgtctaagtttagggtaggaggtcacctgaggcgaagagcagggtgagaccccgagcggcagccttcagagctcagtgttgacccgctggatgtaggcgctgctgagggagtcctcat

SEQ ID NO: 19418 - DNA, 119 bp, homo sapiens
cagccttcatgagctcagtgttgacccgctggatgtaggcgctgctgagggagtcctcatcatctccatgctcacagtatgcacatgtggcagggctgactcattactgagcagcatga

SEQ ID NO: 19419 - DNA, 119 bp, homo sapiens
catctccatagctcacagtatgcacatgtggcagggctgactcattactgagcagcatgagccactgcagaagggctcctgtccctcatgccggcctggattttttttttttttttttt

SEQ ID NO: 19420 - DNA, 119 bp, homo sapiens
gtccagtcctcttggtagtaccagggctactgtagacccaggtggagatgttggcaccagcactcatcagtactgcacatctagactggcctcaatcccggcccggccccggccctgtt

SEQ ID NO: 19421 - DNA, 119 bp, homo sapiens
cactcatcaggtactgcacatctagactggcctcaatcccggcccggccccggccctgttgtccaaccaacgggctactgatgcctgatgtgcaaagttgccaccgaagaggcgcatga

SEQ ID NO: 19422 - DNA, 119 bp, homo sapiens
gtccaaccacacgggctactgatgcctgatgtgcaaagttgccaccgaagaggcgcatgaactgagccagtctgagtcatggaaatactgctccaggaactatggagggagtcagagca

SEQ ID NO: 19423 - DNA, 119 bp, homo sapiens
tgaggaccctggggctctttgcttggctcacctgggcacaggcttggctgttattgctggtgccagagccacgtcttgtgaggtcaagttgtatcgcttacggatcacagagggggtta

SEQ ID NO: 19424 - DNA, 119 bp, homo sapiens
tgccagagcccacgtcttgtgaggtcaagttgtatcgcttacggatcacagagggggttacccccagatcaggcctacagtccctgtcacctgcggctcaggacgttgcctcagggatg

SEQ ID NO: 19425 - DNA, 119 bp, homo sapiens
cccccagatgcaggcctacagtccctgtcacctgcggctcaggacgttgcctcagggatgatgttggggaaaacggtgcagtccccccactgtagggagaagtcaggcttgaggagatc

SEQ ID NO: 19426 - DNA, 119 bp, homo sapiens
cttcctcagcccctggatctgtgtgccccaacccccattcaccccataggtgttaccaaagtccacatgggggccaaggcctgtggaagctggtagggatgtggggaccttacaacatg

SEQ ID NO: 19427 - DNA, 119 bp, homo sapiens
gtccacatggggggccaaggcctgtggaagctggtagggatgtggggaccttacaacatgggtttccgtggtcctcccacatagtgatgaaactcagccccagggagcagcagctctgc

SEQ ID NO: 19428 - DNA, 119 bp, homo sapiens
ggtttccgtaggtcctcccacatagtgatgaaactcagccccagggagcagcagctctgcttgtctggagtcagagaacagaggtcagaaagctcaaaacggaacagaagaagctacct

SEQ ID NO: 19429 - DNA, 119 bp, homo sapiens
gatgggatgactggtgccctccatggagcaatcatttcctctcaccggatgctcagccagcaagtcagaagtcctgtgtgatcacagaatggcacttctgggctccggctgccaagagc

SEQ ID NO: 19430 - DNA, 119 bp, homo sapiens
caagtcagaaagtcctgtgtgatcacagaatggcacttctgggctccggctgccaagagccatttttgcccgtgtggagggtcagtggggatggcctcaccagatcagccacattctct

SEQ ID NO: 19431 - DNA, 119 bp, homo sapiens
catttttgcaccgtgtggagggtcagtggggatggcctcaccagatcagccacattctctagggtcaggattttcctgcagggattcagaagaggcacttgccctcattcattgctttc

SEQ ID NO: 19432 - DNA, 119 bp, homo sapiens
ctgtgtccctccaccgcatcccacatcctgtcctcagtcccaaaaggcaccgtattgaggagagctgggtccgacacagcctgcaccagctccgagagtctttccacattctgctgtct

SEQ ID NO: 19433 - DNA, 119 bp, homo sapiens
agagctgggatccgacacagcctgcaccagctccgagagtctttccacattctgctgtctcagggcaaagtgagactcagctcttcctcagggtccgcacggcccagggacacccagcc

SEQ ID NO: 19434 - DNA, 119 bp, homo sapiens
cagggcaaaggtgagactcagctcttcctcagggtccgcacggcccagggacacccagcctgggggcagctgtagggtcaggggtcagggacatggctttggttagggtggagatggaa

SEQ ID NO: 19435 - DNA, 119 bp, homo sapiens
ggaagccgccgcgggccgggcgcggggaggtgtcatgcgccggaacctgcgcttggggccaagctctgggctgacgcgcaggggcaaggcgccccgcgtcccggactggcggctccgcg

SEQ ID NO: 19436 - DNA, 119 bp, homo sapiens
aagctctggagctgacgcgcaggggcaaggcgccccgcgtcccggactggcggctccgcgcatgctcctccaccggcgtcgcaggcctcgagaggctccggaagtactgggtgcagcct

SEQ ID NO: 19437 - DNA, 119 bp, homo sapiens
catgctcctcccaccggcgtcgcaggcctcgagaggctccggaagtactgggtgcagcctgatggcgcagaggtagacacggcacagggcgccgagatgcggcggggcgcgggcgcggc

SEQ ID NO: 19438 - DNA, 119 bp, homo sapiens
gatggcgcaggaggtagacacggcacagggcgccgagatgcggcggggcgcgggcgcggctcggggacggcttcctggtgctgggccctggcgctgctttggctcgcggtggttccggg

SEQ ID NO: 19439 - DNA, 119 bp, homo sapiens
tcggggacgcgcttcctggtgctgggccctggcgctgctttggctcgcggtggttccgggctggtcccggtctcgggcatcccctcccggcgccactggccggtgccctacaagtgagt

SEQ ID NO: 19440 - DNA, 119 bp, homo sapiens
ttagaatctaagtagatggtttctttttctttattaggcgctttgacttccgtccaaaacctgatccttttgtcaagctaagtatactttctgtccaactggctcacctatcccagtta

SEQ ID NO: 19441 - DNA, 119 bp, homo sapiens
ctgatccttattgtcaagctaagtatactttctgtccaactggctcacctatcccagttatggagggtgtgatgacattgaagtttttcgattacaagccccagtatgggaatttaaat

SEQ ID NO: 19442 - DNA, 119 bp, homo sapiens
tggagggtgatgatgacattgaagtttttcgattacaagccccagtatgggaatttaaatatggagacccctgggacacttggtaaggatgcatcttggtcttataactttggttaatt

SEQ ID NO: 19443 - DNA, 119 bp, homo sapiens
tacacagaaaattatgcatgatgccattggattcagaagtacattaactggcaagaactacacaatggatggtatgaacttttccaacttggcaactgtacatttccccatctccgacc

SEQ ID NO: 19444 - DNA, 119 bp, homo sapiens
cacaatggaatggtatgaacttttccaacttggcaactgtacatttccccatctccgacctgaaatggagcccctttctggtgtaatcaaggcgctgcctgcttttttgagggaattga

SEQ ID NO: 19445 - DNA, 119 bp, homo sapiens
tgaaatggatgcccctttctggtgtaatcaaggcgctgcctgcttttttgagggaattgatgatgttcatggaaggaaaatgggacattagttcaagtagcaactatatcaggtaagtt

SEQ ID NO: 19446 - DNA, 119 bp, homo sapiens
tttttttaaactaggaaacatgttcaaccaaatggcaaagtgggtgaaacaggacaatgaaacaggaattattatgagacatggaatgtaaaagccagcccagaaaagggggcagagac

SEQ ID NO: 19447 - DNA, 119 bp, homo sapiens
aacaggaatttattatgagacatggaatgtaaaagccagcccagaaaagggggcagagacatggtttgatcctacgactgttccaaatttgtgttaaggacctttaacaagttggctga

SEQ ID NO: 19448 - DNA, 119 bp, homo sapiens
atggtttgattcctacgactgttccaaatttgtgttaaggacctttaacaagttggctgaatttggagcgagttcaagaacatagaaaccaactatacaagaatatttctttacagtgg

SEQ ID NO: 19449 - DNA, 119 bp, homo sapiens
atttggagcagagttcaagaacatagaaaccaactatacaagaatatttctttacagtggagaacctactatctgggaaatgaaacatctgtttttgggccaacaggaaacaagactct

SEQ ID NO: 19450 - DNA, 119 bp, homo sapiens
agaacctacttatctgggaaatgaaacatctgtttttgggccaacaggaaacaagactcttggtttagcataaaaagattttattaccccttcaaaccacatttgccaactaaagaatt

SEQ ID NO: 19451 - DNA, 119 bp, homo sapiens
tggtttagccataaaaagattttattaccccttcaaaccacatttgccaactaaagaatttctgttgagctcttgcaaatttttgatgcagtgattgtgcacaaacagttctatttgtt

SEQ ID NO: 19452 - DNA, 119 bp, homo sapiens
tctgttgagtctcttgcaaatttttgatgcagtgattgtgcacaaacagttctatttgttttataatttgaatattggtttttacctatgaaattcccttttattaaaataacatatga

SEQ ID NO: 19453 - DNA, 119 bp, homo sapiens
ttataattttgaatattggtttttacctatgaaattcccttttattaaaataacatatgaagaaatcccttacctatcagaaacaaaacactctctggtttataaaacaccttaattct

SEQ ID NO: 19454 - DNA, 119 bp, homo sapiens
agaaatccctttacctatcagaaacaaaacactctctggtttataaaacaccttaattctactgctctttttctccaatcaccagcatctgtttttcagggggtgattttacttttgtg

SEQ ID NO: 19455 - DNA, 119 bp, homo sapiens
actgctcttttttctccaatcaccagcatctgtttttcagggggtgattttacttttgtgaattccttacctttcttccttggtgcataaagttaaaatgcacatcagcagaattgctg

SEQ ID NO: 19456 - DNA, 119 bp, homo sapiens
aattccttagcctttcttccttggtgcataaagttaaaatgcacatcagcagaattgctgcatattaactctcaggactcttctcttgtaaagaagctgaaattcgtactatattggcc

SEQ ID NO: 19457 - DNA, 119 bp, homo sapiens
catattaacatctcaggactcttctcttgtaaagaagctgaaattcgtactatattggccaaagtgagcagttaggtgatcttggtttcaatttccgagcctttgttaatatggagaat

SEQ ID NO: 19458 - DNA, 119 bp, homo sapiens
aaagtgagcgagttaggtgatcttggtttcaatttccgagcctttgttaatatggagaattatggttcaatcagttatgtaggacctttggacccagggtcctacagatagatatggtg

SEQ ID NO: 19459 - DNA, 119 bp, homo sapiens
tatggttcatatcagttatgtaggacctttggacccagggtcctacagatagatatggtgtgcccagatttaaaaataccttcaaaaataaaaaatacattcagtgacattttcatggt

SEQ ID NO: 19460 - DNA, 119 bp, homo sapiens
tgcccagattttaaaaataccttcaaaaataaaaaatacattcagtgacattttcatggtgggagctctctttctgatatggcagttacactttttcacttaagtgctttagtttagac

SEQ ID NO: 19461 - DNA, 119 bp, homo sapiens
gggagctcttctttctgatatggcagttacactttttcacttaagtgctttagtttagactaactttacacttctataacttttggaaccaagtttagtatagtctgattacattccat

SEQ ID NO: 19462 - DNA, 119 bp, homo sapiens
taactttacaacttctataacttttggaaccaagtttagtatagtctgattacattccattcacctaacttagacattcgtttagacaccataactggagtgattgtgcttctagatgt

SEQ ID NO: 19463 - DNA, 119 bp, homo sapiens
tcacctaactttagacattcgtttagacaccataactggagtgattgtgcttctagatgtggcaaatccgtgttaacacatatttctggctgagattttggaactagctagtaactggc

SEQ ID NO: 19464 - DNA, 119 bp, homo sapiens
ggcaaatccagtgttaacacatatttctggctgagattttggaactagctagtaactggcttgtgttcttaagcatactaacatcactaaatcttaggatttaggattgctgtaaagat

SEQ ID NO: 19465 - DNA, 119 bp, homo sapiens
ttgtgttctttaagcatactaacatcactaaatcttaggatttaggattgctgtaaagatgtaagttgttatgtttggcaggtcacattgaatggcagtgataatgattaatcaaagaa

SEQ ID NO: 19466 - DNA, 119 bp, homo sapiens
gtaagttgtgtatgtttggcaggtcacattgaatggcagtgataatgattaatcaaagaacaaatgtcaccttgatcttgcctaatgtagtttatgtgccaaactttccagggttttgt

SEQ ID NO: 19467 - DNA, 119 bp, homo sapiens
caaatgtcatccttgatcttgcctaatgtagtttatgtgccaaactttccagggttttgtagtcacctaattttaagctgatagcatagtgcttcagcggttcttctaaccggggtatg

SEQ ID NO: 19468 - DNA, 119 bp, homo sapiens
agtcacctagattttaagctgatagcatagtgcttcagcggttcttctaaccggggtatgcaggaacatgctgcagacacgtttgggtaaacaggcaccttctgacttcttcattgttt

SEQ ID NO: 19469 - DNA, 119 bp, homo sapiens
caggaacatggctgcagacacgtttgggtaaacaggcaccttctgacttcttcattgtttcctgtagtttccctcttcccacaaagctgtcagcgcagtggaagaggttgcacttctcc

SEQ ID NO: 19470 - DNA, 119 bp, homo sapiens
cctgtagttctccctcttcccacaaagctgtcagcgcagtggaagaggttgcacttctccgagagaggaaggtttctgttaagatcaccaagtagctgtgctttaattagagccagaca

SEQ ID NO: 19471 - DNA, 119 bp, homo sapiens
gagagaggacaggtttctgttaagatcaccaagtagctgtgctttaattagagccagacaagctttcaagtcctttaagtatttgatgatcaactgaacacgtttctattcaaggagaa

SEQ ID NO: 19472 - DNA, 119 bp, homo sapiens
agctttcaaggtcctttaagtatttgatgatcaactgaacacgtttctattcaaggagaaaacaccattagtaagaagatggagtagatatcagataaaacaattcacgtttaatatgt

SEQ ID NO: 19473 - DNA, 119 bp, homo sapiens
aacaccattcagtaagaagatggagtagatatcagataaaacaattcacgtttaatatgtaaatgtaccattatgtgattcagtttcaactttcaagtacttcctgagaggttagtaca

SEQ ID NO: 19474 - DNA, 119 bp, homo sapiens
aaatgtaccaattatgtgattcagtttcaactttcaagtacttcctgagaggttagtacattattattggctctcacagaaagcttaatcatagatataattaacctgatccaaatgag

SEQ ID NO: 19475 - DNA, 119 bp, homo sapiens
ttattattgagctctcacagaaagcttaatcatagatataattaacctgatccaaatgagtaaagtggacttagaaaggctaagtgatctttctctggctatccagctagtagtaatga

SEQ ID NO: 19476 - DNA, 119 bp, homo sapiens
taaagtggaccttagaaaggctaagtgatctttctctggctatccagctagtagtaatgaagtcaggtctgaaccccggttctgctgactgaattggatgcactatagtacaggctttt

SEQ ID NO: 19477 - DNA, 119 bp, homo sapiens
agtcaggtcttgaaccccggttctgctgactgaattggatgcactatagtacaggcttttagcaccgaatgtggtcctcagaccagtgcctgccaaccagatgttactggtctgtgagg

SEQ ID NO: 19478 - DNA, 119 bp, homo sapiens
agcaccgaagtgtggtcctcagaccagtgcctgccaaccagatgttactggtctgtgaggaaataagtaagatactgacaggaagcttttataaacaatttattggagtgtttttgttt

SEQ ID NO: 19479 - DNA, 119 bp, homo sapiens
tcatttttgctgggtttttttttttcaactgtagtcccacaacagtctgaaaataacccagtcaccagaatcttcctcaaatacagagggagaactttctttcacgcctcctttagcct

SEQ ID NO: 19480 - DNA, 119 bp, homo sapiens
aaaaacacctctaacaccacttggggctgtgactgtatttacttcattcttgaatcccgcgtccccgtgctgggggctgacacatccctgggcaccactgtgacttcctgtgggtccct

SEQ ID NO: 19481 - DNA, 119 bp, homo sapiens
gtccccgtggctgggggctgacacatccctgggcaccactgtgacttcctgtgggtcccttcccttctgccctgactctgtagaccccccacaggaagggtcctaggtagggggaggtt

SEQ ID NO: 19482 - DNA, 119 bp, homo sapiens
tcccttctgtccctgactctgtagaccccccacaggaagggtcctaggtagggggaggttcctcctccctgaaaccctgggccactctgtcaaggcaaagcctctgggcccagcacctt

SEQ ID NO: 19483 - DNA, 119 bp, homo sapiens
cctcctcccttgaaaccctgggccactctgtcaaggcaaagcctctgggcccagcaccttgtaaaggcttgatgagaggagctctggcttttgctcagggcctttggcaccccaccctc

SEQ ID NO: 19484 - DNA, 119 bp, homo sapiens
gtaaaggctttgatgagaggagctctggcttttgctcagggcctttggcaccccaccctccagcccccagaatgcaggcgctcaaagcctgtggctaggctgcccgaagcgcgtgccgc

SEQ ID NO: 19485 - DNA, 119 bp, homo sapiens
cagcccccaggaatgcaggcgctcaaagcctgtggctaggctgcccgaagcgcgtgccgcagttcttctgagtgggagcagggggacagagctttgggtagaggagggtcacctgcaaa

SEQ ID NO: 19486 - DNA, 119 bp, homo sapiens
agttcttctggagtgggagcagggggacagagctttgggtagaggagggtcacctgcaaagctggaatgcaggggagtgggcggtgcctccagctcctgggggccagggtgtctccata

SEQ ID NO: 19487 - DNA, 119 bp, homo sapiens
gctggaatgccaggggagtgggcggtgcctccagctcctgggggccagggtgtctccatacctcatgggctgagcctgggcaggggtctggagtgcacatagcccccaggcagggagag

SEQ ID NO: 19488 - DNA, 119 bp, homo sapiens
cctcatgggcctgagcctgggcaggggtctggagtgcacatagcccccaggcagggagagggcagtgacggacagagccactcatctgtcccaaagctgcacccaaggggtgtcagcaa

SEQ ID NO: 19489 - DNA, 119 bp, homo sapiens
ggcagtgacaggacagagccactcatctgtcccaaagctgcacccaaggggtgtcagcaaccccaacctctgacctactttgggaccacaggcccatctagtgcaaatgaggcccagaa

SEQ ID NO: 19490 - DNA, 119 bp, homo sapiens
ccccaacctactgacctactttgggaccacaggcccatctagtgcaaatgaggcccagaaaggagaaatctttgctcaacagccacagtaggctgacgtaacctatgtaatgtagggtc

SEQ ID NO: 19491 - DNA, 119 bp, homo sapiens
aggagaaatgctttgctcaacagccacagtaggctgacgtaacctatgtaatgtagggtcagggtgggctgagggatgagccaggtggtgggcaggtgacacaccaggtcccctcctgg

SEQ ID NO: 19492 - DNA, 119 bp, homo sapiens
agggtgggcctgagggatgagccaggtggtgggcaggtgacacaccaggtcccctcctggcctctgcccacccagccctctcctgcacggctaccagaagatgtccgggaagaacagac

SEQ ID NO: 19493 - DNA, 119 bp, homo sapiens
cctctgccccacccagccctctcctgcacggctaccagaagatgtccgggaagaacagactagccctgatagggagtgtggtcaggtgcagaggagggcaggggcccggatcctggccc

SEQ ID NO: 19494 - DNA, 119 bp, homo sapiens
tagccctgagtagggagtgtggtcaggtgcagaggagggcaggggcccggatcctggcccagaaacacttaaaacagaatccgatcctgagatgatccaaatcaaacagaaacttgacg

SEQ ID NO: 19495 - DNA, 119 bp, homo sapiens
agaaacactctaaaacagaatccgatcctgagatgatccaaatcaaacagaaacttgacggaaatagtaagtctgaaaatgatgcactctgcgcacacatatacaagacacacacacac

SEQ ID NO: 19496 - DNA, 119 bp, homo sapiens
cacacgaatccacgcacacgaggcacaccccactcatgctctcggtctctggttacacacccacacccccctactcctgtattcagatgccctccatggcccaccctcccacccagcag

SEQ ID NO: 19497 - DNA, 119 bp, homo sapiens
ccacaccccccctactcctgtattcagatgccctccatggcccaccctcccacccagcagagcgccagacctggtgccagggactcagtgccgactgctgacgtgaagggtgtagaaag

SEQ ID NO: 19498 - DNA, 119 bp, homo sapiens
agcgccagagcctggtgccagggactcagtgccgactgctgacgtgaagggtgtagaaagcccagggctagggacgtagatgacacccgggtacttcttcctgagaacagggtcattcc

SEQ ID NO: 19499 - DNA, 119 bp, homo sapiens
cccagggctcagggacgtagatgacacccgggtacttcttcctgagaacagggtcattccacagccagggacccagagcgccacaagcaagagggtcagtgcgaaggaggagaagagga

SEQ ID NO: 19500 - DNA, 119 bp, homo sapiens
acagccaggcgacccagagcgccacaagcaagagggtcagtgcgaaggaggagaagaggaagaggccgtgctgtccaggaagaggcgcttgcgcttctggtgcaggacgagggccagca

SEQ ID NO: 19501 - DNA, 119 bp, homo sapiens
agaggccgttgctgtccaggaagaggcgcttgcgcttctggtgcaggacgagggccagcatggcgaagaggtgaagatgaagaggatgaagatctggccctcggtgaccaggtacctgg

SEQ ID NO: 19502 - DNA, 119 bp, homo sapiens
tttgctgccgtggctctctcagtgcccctgcctctgcccccatgctgatgtccactcaccagtagtacagccactgggtgccaccaggagcagggcaggccctggaatcaagctctcag

SEQ ID NO: 19503 - DNA, 119 bp, homo sapiens
agtagtacaggccactgggtgccaccaggagcagggcaggccctggaatcaagctctcagctttagaggagtaaagcagccgctgaagtacatgaagaggatgaggaagaaggggatgt

SEQ ID NO: 19504 - DNA, 119 bp, homo sapiens
ctttagaggcagtaaagcagccgctgaagtacatgaagaggatgaggaagaaggggatgtacctgtgacggaaggccagtgtcttagaggcctgctcagcggccctcttccccacaacc

SEQ ID NO: 19505 - DNA, 119 bp, homo sapiens
aggcagggagcaggaggtggcctcaccagcgtctccggcttgagattcttgatgatggggttctcacggcagacaggtggtgctggtagccactgaagagcaggcggtggttgacagag

SEQ ID NO: 19506 - DNA, 119 bp, homo sapiens
ttctcacggacagacaggtggtgctggtagccactgaagagcaggcggtggttgacagagtcacccaccggtggatgctggcacccatgatgaagatgatgatgctcacgtacgtgatg

SEQ ID NO: 19507 - DNA, 119 bp, homo sapiens
tcacccaccaggtggatgctggcacccatgatgaagatgatgatgctcacgtacgtgatggagcgtggcgggtgcggggggaccgctcgatgagctggggttcagagtggggttggcag

SEQ ID NO: 19508 - DNA, 119 bp, homo sapiens
aggcgcctagcccgccctctcaccccggcgcgcgcccacctggcctgcaggaaggaggcgcccagctgccgcctgggccgcccgtcgctcccaggtgctgccgcctccgcgtcgcctcc

SEQ ID NO: 19509 - DNA, 119 bp, homo sapiens
cccagctgcgcgcctgggccgcccgtcgctcccaggtgctgccgcctccgcgtcgcctccatggctgcccgcaggcccctcggccctgcctttccgaggaagagaccggttcagctcgg

SEQ ID NO: 19510 - DNA, 119 bp, homo sapiens
atggctgccccgcaggcccctcggccctgcctttccgaggaagagaccggttcagctcggctgccccggggaggccgccgcaaattcccagcgcggggcggttcggggcgggccggcga

SEQ ID NO: 19511 - DNA, 119 bp, homo sapiens
ctgccccggcggaggccgccgcaaattcccagcgcggggcggttcggggcgggccggcgagagcgcgcgccctcgggaggaacaggcggggctgcggacccggggcggggcggagcgga

SEQ ID NO: 19512 - DNA, 119 bp, homo sapiens
gaaatggggtgtggggcgagaggaagcagggaggagagtgatttgagtagaaaagaaacacagcattccggctggccccacctctatattgataagtagccaatgggagcgggtagccc

SEQ ID NO: 19513 - DNA, 119 bp, homo sapiens
cagcattccaggctggccccacctctatattgataagtagccaatgggagcgggtagccctgatccctgccaatggaaactgaggtaggcgggtcatcgcgctggggtctgtagtctga

SEQ ID NO: 19514 - DNA, 119 bp, homo sapiens
tgatccctggccaatggaaactgaggtaggcgggtcatcgcgctggggtctgtagtctgagcgctacccgttgctgctgcccaaggaccgcggagtcggacgcaggtaggagagcggcc

SEQ ID NO: 19515 - DNA, 119 bp, homo sapiens
ggtggcgtgggcttaagcagttgccagacgttccttggtactttgcaggcagaccatgtggaccctggtagctgggtggccttaacagcagggctggtggctggaacgcggtgcccaga

SEQ ID NO: 19516 - DNA, 119 bp, homo sapiens
gaccctggtgagctgggtggccttaacagcagggctggtggctggaacgcggtgcccagatggtcagtttgccctgtggcctgctgcctggaccccggaggagccagctacagctgctg

SEQ ID NO: 19517 - DNA, 119 bp, homo sapiens
tggtcagttctgccctgtggcctgctgcctggaccccggaggagccagctacagctgctgccgtcccctctggtgagtgcccctcagcctaggcaagagctggcagcctgggttttccc

SEQ ID NO: 19518 - DNA, 119 bp, homo sapiens
gccagaggaggacgccaggcacaagtctgtggtttatcattttccctgtctttctaggacaaatggccccaacactgagcaggcatctgggtggcccctgccaggttgatgcccactgc

SEQ ID NO: 19519 - DNA, 119 bp, homo sapiens
aaatggcccacaacactgagcaggcatctgggtggcccctgccaggttgatgcccactgctctgccggcactcctgcatctttaccgtctcagggacttccagttgctgccccttccca

SEQ ID NO: 19520 - DNA, 119 bp, homo sapiens
tctgccggccactcctgcatctttaccgtctcagggacttccagttgctgccccttcccagaggtgagctgccatcagcccagtggaggggcttaggtctgcatttatgcttttcctgc

SEQ ID NO: 19521 - DNA, 119 bp, homo sapiens
ttgggggccaggggcagggggtgaagacggagtcaggaccattttttctcaggcttcctgctgtgaagaagggtgcactgctgtccgcacggtgccttctgcgacctggttcacacccg

SEQ ID NO: 19522 - DNA, 119 bp, homo sapiens
ctgtgaagacagggtgcactgctgtccgcacggtgccttctgcgacctggttcacacccgctgcatcaccccacgggcacccaccccctggcaaagaagctccctgcccagaggactaa

SEQ ID NO: 19523 - DNA, 119 bp, homo sapiens
ctgcatcacacccacgggcacccaccccctggcaaagaagctccctgcccagaggactaacagggcagggaggaggtgggagagcatcaggccaggggctggggcggggcctcattgac

SEQ ID NO: 19524 - DNA, 119 bp, homo sapiens
ctccctgtgtgctactgagcctggaagtgacaaagacccacccctgtccccactcaggccacctgctgcccgatcacctgcactgctgcccccaagacactgtgtgtgacctgatccag

SEQ ID NO: 19525 - DNA, 119 bp, homo sapiens
acctgctgctccgatcacctgcactgctgcccccaagacactgtgtgtgacctgatccagagtaagtgctctccaaggagaacgctaccacggacctcctcactaagctgcctgcgcac

SEQ ID NO: 19526 - DNA, 119 bp, homo sapiens
agtaagtgcctctccaaggagaacgctaccacggacctcctcactaagctgcctgcgcacacaggtaccgaggcagggtgcagatacaggggtggggccccctttcctcccttttaggc

SEQ ID NO: 19527 - DNA, 119 bp, homo sapiens
ccacctgcccttcttcatctgccctaggctgtgtgctgtgaggaccacatacactgctgtcccgcggggttacgtgtgacacgcagaagggtacctgtgaacaggggccccaccaggtg

SEQ ID NO: 19528 - DNA, 119 bp, homo sapiens
cccgcggggtttacgtgtgacacgcagaagggtacctgtgaacaggggccccaccaggtgccctggatgagaaggccccagctcacctcagcctgccagacccacaagccttgaagaga

SEQ ID NO: 19529 - DNA, 119 bp, homo sapiens
ccctggatggagaaggccccagctcacctcagcctgccagacccacaagccttgaagagagatgtccccgtgataatgtcagcagctgtccctcctccgatacctgctgccaactcacg

SEQ ID NO: 19530 - DNA, 119 bp, homo sapiens
gatgtcccctgtgataatgtcagcagctgtccctcctccgatacctgctgccaactcacgtctggggagggggctgctgtccaatcccagaggtatatgggaggggacagcatcttggc

SEQ ID NO: 19531 - DNA, 119 bp, homo sapiens
caggctgtctgctgctcggaccaccagcactgctgcccccagggctacacgtgtgtagctgaggggcaggtcagcgaggaagcgagatcgtggctggactggagaagatgcctgcccgc

SEQ ID NO: 19532 - DNA, 119 bp, homo sapiens
gaggggcagtgtcagcgaggaagcgagatcgtggctggactggagaagatgcctgcccgccgggcttcctatcccaccccagagacatcggctgtgaccagcacaccagctgcccggtg

SEQ ID NO: 19533 - DNA, 119 bp, homo sapiens
cgggcttccttatcccaccccagagacatcggctgtgaccagcacaccagctgcccggtggggcagaccgctgcccgagcctgggtgggagctgggcctgctgccagttgccccatgtg

SEQ ID NO: 19534 - DNA, 119 bp, homo sapiens
gccaggctgtgtgctgcgaggatcgccagcactgctgcccggctggctacacctgcaacgtgaaggctcatcctgcgagaaggaagtggtctctgcccagcctgccaccttcctggccc

SEQ ID NO: 19535 - DNA, 119 bp, homo sapiens
tgaaggctcgatcctgcgagaaggaagtggtctctgcccagcctgccaccttcctggcccgtagccctccgtgggtgtgaaggacgtggagtgtggggaaggacacttctgccatgata

SEQ ID NO: 19536 - DNA, 119 bp, homo sapiens
gtagccctcacgtgggtgtgaaggacgtggagtgtggggaaggacacttctgccatgataaccagacctctgccgagacaaccgacagggctgggcctgctgtccctaccgccaggtca

SEQ ID NO: 19537 - DNA, 119 bp, homo sapiens
cccccctctgaccatccagggcgtctgttgtgctgatcggcgccactgctgtcctgctggcttccgctggcagccaggggtaccaagtgtttgcgcagggaggccccgcgctgggacgc

SEQ ID NO: 19538 - DNA, 119 bp, homo sapiens
cttccgctgcgcagccaggggtaccaagtgtttgcgcagggaggccccgcgctgggacgcccctttgaggacccagccttgagacagctgctgtgagggacagtactgaagactctgca

SEQ ID NO: 19539 - DNA, 119 bp, homo sapiens
ccctttgagggacccagccttgagacagctgctgtgagggacagtactgaagactctgcagccctcgggccccactcggagggtgccctctgctcaggcctccctagcacctcccccta

SEQ ID NO: 19540 - DNA, 119 bp, homo sapiens
gccctcgggaccccactcggagggtgccctctgctcaggcctccctagcacctccccctaaccaaattcccctggaccccattctgagctccccatcaccatgggaggtggggcctcaa

SEQ ID NO: 19541 - DNA, 119 bp, homo sapiens
accaaattctccctggaccccattctgagctccccatcaccatgggaggtggggcctcaatctaaggcctccctgtcagaagggggttgtggcaaaagccacattacaagctgccatcc

SEQ ID NO: 19542 - DNA, 119 bp, homo sapiens
tctaaggccttccctgtcagaagggggttgtggcaaaagccacattacaagctgccatcccctccccgttcagtggaccctgtggccaggtgcttttccctatccacaggggtgtttgt

SEQ ID NO: 19543 - DNA, 119 bp, homo sapiens
cctccccgtttcagtggaccctgtggccaggtgcttttccctatccacaggggtgtttgtgtgtgtgcggtgtgcgtttcaataaagtttgtacactttcttaacagtgtctgatttgc

SEQ ID NO: 19544 - DNA, 119 bp, homo sapiens
aaggataagaaactactctttattttagacaacctcataaaattattttcacatcccccccaacttcttctcttaatcctcatcttttagttgaagaataaggcttaagagagagaaag

SEQ ID NO: 19545 - DNA, 119 bp, homo sapiens
caacttcttgctcttaatcctcatcttttagttgaagaataaggcttaagagagagaaaggaaaaaccaaatggctaaacttagcagcaccaacacggttctttcatcaaggcgtagct

SEQ ID NO: 19546 - DNA, 119 bp, homo sapiens
gaaaaaccataatggctaaacttagcagcaccaacacggttctttcatcaaggcgtagctcatcatttcccaaactgacatgctacagaaatgtcttccaaaaagcgttaagttttcac

SEQ ID NO: 19547 - DNA, 119 bp, homo sapiens
catcatttctccaaactgacatgctacagaaatgtcttccaaaaagcgttaagttttcacagagtggggctatgatttccatgctcaaatagtgtaggaaatggtagattacgttagtt

SEQ ID NO: 19548 - DNA, 119 bp, homo sapiens
agagtggggactatgatttccatgctcaaatagtgtaggaaatggtagattacgttagttttgtttacttaacaggaattctcaggagtccttagacactctaatgtgggttgatctcc

SEQ ID NO: 19549 - DNA, 119 bp, homo sapiens
agaaggagaaagggagtgtgtagtattttccaagctttttgagcaaacaatccttttctcatggaacactcagaaacagtttggagtatgctggtaaatgtgttttggggatggaagtc

SEQ ID NO: 19550 - DNA, 119 bp, homo sapiens
atggaacacatcagaaacagtttggagtatgctggtaaatgtgttttggggatggaagtcagaaagcctatctttttcatatggttcctcctattctctgctaaagccagcaacagagt

SEQ ID NO: 19551 - DNA, 119 bp, homo sapiens
agaaagcctgatctttttcatatggttcctcctattctctgctaaagccagcaacagagtaagttgacttagcatcaagaccactagtcatattaagaaagggcaggttggtcgagaat

SEQ ID NO: 19552 - DNA, 119 bp, homo sapiens
aagttgactctagcatcaagaccactagtcatattaagaaagggcaggttggtcgagaatggaataggagaactagctgcctcacttttcactttcgcgcctacattttcttcgctccc

SEQ ID NO: 19553 - DNA, 119 bp, homo sapiens
ggaataggaagaactagctgcctcacttttcactttcgcgcctacattttcttcgctccctaagttataaagatgtacatttcctctcttaagcaacttaatttgggtgctacttccct

SEQ ID NO: 19554 - DNA, 119 bp, homo sapiens
taagttatacaagatgtacatttcctctcttaagcaacttaatttgggtgctacttccctccttttgtgcagcaactaattcatcactacctgaggagacaaagtgggtgctgcagaag

SEQ ID NO: 19555 - DNA, 119 bp, homo sapiens
ccttttgtgacagcaactaattcatcactacctgaggagacaaagtgggtgctgcagaagcaagactgtggccagtgggatttgtctaataattgatgataagatgatagcacagaggg

SEQ ID NO: 19556 - DNA, 119 bp, homo sapiens
caagactgtaggccagtgggatttgtctaataattgatgataagatgatagcacagagggcaacgtactagagaggaaggcagccttaagaaatgatgcagaaatagccaagcaagatt

SEQ ID NO: 19557 - DNA, 119 bp, homo sapiens
caacgtactgagagaggaaggcagccttaagaaatgatgcagaaatagccaagcaagatttttccaagcctggttaaatcaccagcaaaacaaagcatttatgtgagtacctcaggcct

SEQ ID NO: 19558 - DNA, 119 bp, homo sapiens
tttccaagcactggttaaatcaccagcaaaacaaagcatttatgtgagtacctcaggcctgggcacctcttgcttgaaatatggcaagacttggaaaaatgtttgcccttagaatctat

SEQ ID NO: 19559 - DNA, 119 bp, homo sapiens
gggcacctctttgcttgaaatatggcaagacttggaaaaatgtttgcccttagaatctatctcactacttagttagttgtctcctttgggcctgggcacagttctggcactgatctgga

SEQ ID NO: 19560 - DNA, 119 bp, homo sapiens
ctcactactttagttagttgtctcctttgggcctgggcacagttctggcactgatctggaacagactccttttctaaaactgaacttgaccacatcaaaagtttgtaaaacaatctcca

SEQ ID NO: 19561 - DNA, 119 bp, homo sapiens
acagactcccttttctaaaactgaacttgaccacatcaaaagtttgtaaaacaatctccatggtaattaacttgcattcaacaccatatggtaacagaagatggcaaaggataagattc

SEQ ID NO: 19562 - DNA, 119 bp, homo sapiens
tggtaattaaacttgcattcaacaccatatggtaacagaagatggcaaaggataagattcagatcttagtctttccaagtagggcatgttagatgatagaaggattagttgcaagctgg

SEQ ID NO: 19563 - DNA, 119 bp, homo sapiens
agatcttagatctttccaagtagggcatgttagatgatagaaggattagttgcaagctggatctgagctaggcttgggcatgaaggaaactgtctcccatgtggtttggaagagttagg

SEQ ID NO: 19564 - DNA, 119 bp, homo sapiens
atctgagctcaggcttgggcatgaaggaaactgtctcccatgtggtttggaagagttaggggctccctggctctattgtgaactatacgggtttcatccaaggaatggtatgatgtggg

SEQ ID NO: 19565 - DNA, 119 bp, homo sapiens
ggctccctgagctctattgtgaactatacgggtttcatccaaggaatggtatgatgtgggcataaaaccttcttcagacaactgaagatggtccccttctgtagccagaaacactagct

SEQ ID NO: 19566 - DNA, 119 bp, homo sapiens
cataaaaccattcttcagacaactgaagatggtccccttctgtagccagaaacactagctgtcctgcatgtccatttcctttagccccaggcggtcctgcagaaggaaaggccataatt

SEQ ID NO: 19567 - DNA, 119 bp, homo sapiens
aaagaaacaaaaatcaattccatataagtggtacaatataacaaaaaggaacgtacagaaattggcctcctgggagaatcccatagcattgtagccttgctgcaatttaggatccttag

SEQ ID NO: 19568 - DNA, 119 bp, homo sapiens
attggcctccctgggagaatcccatagcattgtagccttgctgcaatttaggatccttagcaagtgcctacacactgttgttacttgggaattgacattcaagaagaagctgttctcca

SEQ ID NO: 19569 - DNA, 119 bp, homo sapiens
caagtgcctgacacactgttgttacttgggaattgacattcaagaagaagctgttctccacgtcctaaaaagaagccagagagaagtgagaggatgggactgaaaacaaccactgacat

SEQ ID NO: 19570 - DNA, 119 bp, homo sapiens
acccatcccatgccagatcaccaacggcagcggcgccggcgggtccagatgctgcagcgcccgagaagccaggtccatggcaggagagccacagccaagagccacaggcagccgggcga

SEQ ID NO: 19571 - DNA, 119 bp, homo sapiens
ccgagaagcgcaggtccatggcaggagagccacagccaagagccacaggcagccgggcgacgccatcttgctgtgtcacatgaccgcgggcgcgagactccgggaaccgcgctccgccc

SEQ ID NO: 19572 - DNA, 119 bp, homo sapiens
cgccatcttcgctgtgtcacatgaccgcgggcgcgagactccgggaaccgcgctccgcccgcctgggcgggcgccgccggttgcagatcgcaacctgcgcatcccgaacggatgcccag

SEQ ID NO: 19573 - DNA, 119 bp, homo sapiens
gcctgggcgtggcgccgccggttgcagatcgcaacctgcgcatcccgaacggatgcccagcctgatggggtcggccctaccctggagctttcagcgcgacaggtcccccgccagacccc

SEQ ID NO: 19574 - DNA, 119 bp, homo sapiens
cctgatgggcgtcggccctaccctggagctttcagcgcgacaggtcccccgccagaccccgctggccgatggggctctgcgctctcgtagaccgccctctgcggtgaatcaaaataatt

SEQ ID NO: 19575 - DNA, 119 bp, homo sapiens
tactgaaagacgactgaataaagttttaaagcttaaggtacatatgcaaaataatcttgtttattagaaatgaacattcacaatgtaaagtagaaattaaattacaaataagtcttcaa

SEQ ID NO: 19576 - DNA, 119 bp, homo sapiens
ttattagaaaatgaacattcacaatgtaaagtagaaattaaattacaaataagtcttcaatggtcaaaatggtgcccagaatttcttctcaaaataagttaatctattcttaaacagat

SEQ ID NO: 19577 - DNA, 119 bp, homo sapiens
tggtcaaaaatggtgcccagaatttcttctcaaaataagttaatctattcttaaacagatgcaggtaagagtttatccttgtcaaaacaaaaaattaacagatttcactttatgtaaga

SEQ ID NO: 19578 - DNA, 119 bp, homo sapiens
gcaggtaagtagtttatccttgtcaaaacaaaaaattaacagatttcactttatgtaagagataaggttatatgaacaagaagagtttatttttaaatgtaaagctgaacaagatagaa

SEQ ID NO: 19579 - DNA, 119 bp, homo sapiens
gataaggtttatatgaacaagaagagtttatttttaaatgtaaagctgaacaagatagaatggagatgcttgtgaagttataaatcccttcaaaatatgaaaatcatcctttcaagttt

SEQ ID NO: 19580 - DNA, 119 bp, homo sapiens
tggagatgctttgtgaagttataaatcccttcaaaatatgaaaatcatcctttcaagtttaaatttgtttcaaaaacatattttctcttcttaaatatgtactactcttaacaatatat

SEQ ID NO: 19581 - DNA, 119 bp, homo sapiens
aaatttgttttcaaaaacatattttctcttcttaaatatgtactactcttaacaatatatcataccttaaatctcctgttgtcattttctctttatacgcaacttggcctactcaagaa

SEQ ID NO: 19582 - DNA, 119 bp, homo sapiens
cataccttaaaatctcctgttgtcattttctctttatacgcaacttggcctactcaagaagacatcaactggtgattttttttcctcaaactttatctccttgctcttttcccaatccc

SEQ ID NO: 19583 - DNA, 119 bp, homo sapiens
gacatcaacatggtgattttttttcctcaaactttatctccttgctcttttcccaatcccatgttacttctttcgccttcttttgtgccaagatgagcaaggtataatcctccaaagaa

SEQ ID NO: 19584 - DNA, 119 bp, homo sapiens
atgttacttcctttcgccttcttttgtgccaagatgagcaaggtataatcctccaaagaagaaaatgctcaaagaaaatgctctcaataaaaaggaaagtaagagtcatttgtgtaagg

SEQ ID NO: 19585 - DNA, 119 bp, homo sapiens
gaaaatgctccaaagaaaatgctctcaataaaaaggaaagtaagagtcatttgtgtaaggttaagtttactaaattttaatcaatattataaacctttgaaagctgggaaacttttttc

SEQ ID NO: 19586 - DNA, 119 bp, homo sapiens
ttaagtttatctaaattttaatcaatattataaacctttgaaagctgggaaacttttttctgttatattttgctggaaacaggttattatgctaagacaaaagctccagtcagtgggct

SEQ ID NO: 19587 - DNA, 119 bp, homo sapiens
tgttatattcttgctggaaacaggttattatgctaagacaaaagctccagtcagtgggcttatgttgccaaatatttctgctagtaggactcactggtatagttaaattaccctacaat

SEQ ID NO: 19588 - DNA, 119 bp, homo sapiens
tatgttgcccaaatatttctgctagtaggactcactggtatagttaaattaccctacaattagtgattattgaaactgcaactttctgggatattttcctcactatgaaaaatcaagtg

SEQ ID NO: 19589 - DNA, 119 bp, homo sapiens
tagtgattaattgaaactgcaactttctgggatattttcctcactatgaaaaatcaagtggttaagacttggactttaaggatagactgttacttagacaagtaacttttctgtgcctc

SEQ ID NO: 19590 - DNA, 119 bp, homo sapiens
taaaacgggaatcataatagtattttcactccataagactgctgtaagaattaaattgtatgttacacatacctggaatgtggaaagcactccacaaattttgctcttatcattttcat

SEQ ID NO: 19591 - DNA, 119 bp, homo sapiens
tgttacacattacctggaatgtggaaagcactccacaaattttgctcttatcattttcatcattaccatattcttgttatttttgtcatgcacactatgcaaaccaagggtagagttta

SEQ ID NO: 19592 - DNA, 119 bp, homo sapiens
cattaccattattcttgttatttttgtcatgcacactatgcaaaccaagggtagagtttactctttaagttagacgtggcccaaaaaatgtaagacagagaaagcagctgcagaatagc

SEQ ID NO: 19593 - DNA, 119 bp, homo sapiens
ctctttaagattagacgtggcccaaaaaatgtaagacagagaaagcagctgcagaatagcaggtaagaggatcccagacttgaccaaatagccagaactggctacggttctgagaaatc

SEQ ID NO: 19594 - DNA, 119 bp, homo sapiens
aggtaagagggatcccagacttgaccaaatagccagaactggctacggttctgagaaatctatggaagcgtcttgctatgggcggcagaggagagtgaaaacagtcttcaaaatttaat

SEQ ID NO: 19595 - DNA, 119 bp, homo sapiens
tatggaagcagtcttgctatgggcggcagaggagagtgaaaacagtcttcaaaatttaatcgtagaatattctatcaaattaagccctttattagagctgaaaaaattgagtttaagag

SEQ ID NO: 19596 - DNA, 119 bp, homo sapiens
cgtagaataattctatcaaattaagccctttattagagctgaaaaaattgagtttaagagcacagctagttagcataaagtgcagattatacagttttaaatttttgtttttatttttt

SEQ ID NO: 19597 - DNA, 119 bp, homo sapiens
cctataaagtgcagattatatagtgtttattctcagatttgaaactatttctaacttaaagtagaaaactttggaaaagtgtttagaaatatttttgcattttcttaacagtgcttatc

SEQ ID NO: 19598 - DNA, 119 bp, homo sapiens
gtagaaaacatttggaaaagtgtttagaaatatttttgcattttcttaacagtgcttatcaatatacatgttatctactagttccttttatcagcattcaacttatgtagaggtagaag

SEQ ID NO: 19599 - DNA, 119 bp, homo sapiens
aatatacatagttatctactagttccttttatcagcattcaacttatgtagaggtagaagttaaacataagtgttatttagccaacttcaggtaaactcagtaaattgttagattaaag

SEQ ID NO: 19600 - DNA, 119 bp, homo sapiens
ttaaacatacagtgttatttagccaacttcaggtaaactcagtaaattgttagattaaagccattttgctcaaatacttattagcctgactagtttggggctgtcagggatcatccaaa

SEQ ID NO: 19601 - DNA, 119 bp, homo sapiens
ccattttgcctcaaatacttattagcctgactagtttggggctgtcagggatcatccaaattaaaaatcaactaaaattctgcagctctacacaactatgcagacatagattgaaaact

SEQ ID NO: 19602 - DNA, 119 bp, homo sapiens
ttaaaaatccaactaaaattctgcagctctacacaactatgcagacatagattgaaaactgttgtgttctccccgccactactgagagatgggaaaaattaaagtaaattaattaatgt

SEQ ID NO: 19603 - DNA, 119 bp, homo sapiens
gttgtgttcctccccgccactactgagagatgggaaaaattaaagtaaattaattaatgttttactaataaatgtttttctccagtttaagggggttgaaaaatagcaataattttaag

SEQ ID NO: 19604 - DNA, 119 bp, homo sapiens
tttactaattaaatgtttttctccagtttaagggggttgaaaaatagcaataattttaagaaaccatttctgttttgtatatatatatataaaataacacatatctggattatgtttct

SEQ ID NO: 19605 - DNA, 119 bp, homo sapiens
aaaccatttactgttttgtatatatatatataaaataacacatatctggattatgtttctaatgtgaattttggcatttgaaagaaagtaggtatccctattaggctaataggcagtga

SEQ ID NO: 19606 - DNA, 119 bp, homo sapiens
aatgtgaatttttggcatttgaaagaaagtaggtatccctattaggctaataggcagtgaagtatcttgtctcttaatcctctgtattgctcaaatattagcattatccatactcattt

SEQ ID NO: 19607 - DNA, 119 bp, homo sapiens
agtatcttgatctcttaatcctctgtattgctcaaatattagcattatccatactcatttattaatgtagggttacttagtgaaaccctgaactaaaataaggcagaggtgtagtatta

SEQ ID NO: 19608 - DNA, 119 bp, homo sapiens
attaatgtaggggttacttagtgaaaccctgaactaaaataaggcagaggtgtagtattagaagaaagatcatagaaggcaaggtaggatgttaggcacgctaaatggaaaatatgtgt

SEQ ID NO: 19609 - DNA, 119 bp, homo sapiens
gaagaaagactcatagaaggcaaggtaggatgttaggcacgctaaatggaaaatatgtgttataattttatttcataagtgaacttgataatagaaaatgcatttttttataaataaaa

SEQ ID NO: 19610 - DNA, 119 bp, homo sapiens
tataatttttatttcataagtgaacttgataatagaaaatgcatttttttataaataaaaagtaggtgttgaataaaaatacctctacttgggtagaggtatttaaaattctataattt

SEQ ID NO: 19611 - DNA, 119 bp, homo sapiens
agtaggtgtctgaataaaaatacctctacttgggtagaggtatttaaaattctataattttgttctgcttggctaattcttacagaaccctctttctggttccactgtatattatttta

SEQ ID NO: 19612 - DNA, 119 bp, homo sapiens
tgttctgctatggctaattcttacagaaccctctttctggttccactgtatattattttaatgacactttgcagtgggtattaagaatacagcttcacatttattcatcattgtccatt

SEQ ID NO: 19613 - DNA, 119 bp, homo sapiens
atgacacttctgcagtgggtattaagaatacagcttcacatttattcatcattgtccattcactcattattcatgcaaccacaaaaaggtattataagaataatatttcatttctgagg

SEQ ID NO: 19614 - DNA, 119 bp, homo sapiens
cactcattagttcatgcaaccacaaaaaggtattataagaataatatttcatttctgaggtaaggaaatatcatctagtatgtttttatataacctactattcacaatgacatgtagaa

SEQ ID NO: 19615 - DNA, 119 bp, homo sapiens
taaggaaattatcatctagtatgtttttatataacctactattcacaatgacatgtagaattctctctgtattcaacatatgttcttgttcttcaaaatctgcaatatctgtagtctga

SEQ ID NO: 19616 - DNA, 119 bp, homo sapiens
ttctctctgttattcaacatatgttcttgttcttcaaaatctgcaatatctgtagtctgattcttggagctggctcaccgcaattgtctagcagagctttagaccaggaagtgccacac

SEQ ID NO: 19617 - DNA, 119 bp, homo sapiens
ttcttggagactggctcaccgcaattgtctagcagagctttagaccaggaagtgccacacagcaagtagttccatcacagtcttagctagtttattcctgaatcctcccatatcttaca

SEQ ID NO: 19618 - DNA, 119 bp, homo sapiens
agcaagtagtttccatcacagtcttagctagtttattcctgaatcctcccatatcttacagaaagagcatgagtcttttgtaaaccactcccaggagggtgatggtgagcactattatt

SEQ ID NO: 19619 - DNA, 119 bp, homo sapiens
gaaagagcaatgagtcttttgtaaaccactcccaggagggtgatggtgagcactattattccacacaccggctgaatgcccatcgtggtccccagtgagcatacacttggctgatgaac

SEQ ID NO: 19620 - DNA, 119 bp, homo sapiens
ccacacaccaggctgaatgcccatcgtggtccccagtgagcatacacttggctgatgaacataggcccagaatccgggctccacttccagatgctgttaaccagcccatgtatacaccc

SEQ ID NO: 19621 - DNA, 119 bp, homo sapiens
ttgcaatgtcagggtacctggcttacctgaggttttggtcctagaatttttgaatatagagtataggactaagattgcagactggatagcctaatcctattagcacagctgatgtaagg

SEQ ID NO: 19622 - DNA, 119 bp, homo sapiens
gtataggacataagattgcagactggatagcctaatcctattagcacagctgatgtaaggaactgggccgatgaatcaccggggtgtagaggcaccaggcttgttcaatcgagcaacca

SEQ ID NO: 19623 - DNA, 119 bp, homo sapiens
aactgggccagatgaatcaccggggtgtagaggcaccaggcttgttcaatcgagcaaccagttggtcttcattgtcatcttccattggagacttccaaagaccaataataatttcccca

SEQ ID NO: 19624 - DNA, 119 bp, homo sapiens
gttggtctttcattgtcatcttccattggagacttccaaagaccaataataatttccccaaatgtggtatagggattgaattattgtgcaaatctgtaaaaacaaaaccattgcagtgc

SEQ ID NO: 19625 - DNA, 119 bp, homo sapiens
ggtatatccatttgcattgttagctctgttttttgttttattttttaaaaacagacataaaaccaaaaaacttaacttactttttggaaagcaacttaactcctaagaaaataacaacg

SEQ ID NO: 19626 - DNA, 119 bp, homo sapiens
aaccaaaaacacttaacttactttttggaaagcaacttaactcctaagaaaataacaacggcttcaacccaagagcagcaagtattatgccattatataacacagcttgttcttgagtc

SEQ ID NO: 19627 - DNA, 119 bp, homo sapiens
gcttcaaccccaagagcagcaagtattatgccattatataacacagcttgttcttgagtccaggcatactatccattgttaatggagtaatgatgctaagaaaaaaaaaattattctta

SEQ ID NO: 19628 - DNA, 119 bp, homo sapiens
taaatttcacaatctacaaaaatagttttatcatttctatctaattaccttagtatggcaaggatcagataatatttaaaattcccaggaaggcgctaagtaaaactggtgttgtatac

SEQ ID NO: 19629 - DNA, 119 bp, homo sapiens
aggatcagaataatatttaaaattcccaggaaggcgctaagtaaaactggtgttgtatacatgtttatcgcagtttaatcacatcccatgtcacacctttttctccaaggaatgtaaaa

SEQ ID NO: 19630 - DNA, 119 bp, homo sapiens
atgtttatctgcagtttaatcacatcccatgtcacacctttttctccaaggaatgtaaaacaagtctgaaaacttattaagataaaattttcacagatgaattattatatgagaagcat

SEQ ID NO: 19631 - DNA, 119 bp, homo sapiens
acacaaccaaacatatacatacaaccttacctgctccaattcccaacaatccacgagcaaccagcatgtgtatttattatgagaagctgggatgtggagatatgcatagaggcagttgg

SEQ ID NO: 19632 - DNA, 119 bp, homo sapiens
ccagcatgtagtatttattatgagaagctgggatgtggagatatgcatagaggcagttggctgccacggaatcaagatggagacaataagaggctcttttcttggtctataattagacc

SEQ ID NO: 19633 - DNA, 119 bp, homo sapiens
ctgccacggaaatcaagatggagacaataagaggctcttttcttggtctataattagaccataaaccaatataggtgaagctaccatttggccaagactatatgaagcaataacccagc

SEQ ID NO: 19634 - DNA, 119 bp, homo sapiens
ataaaccaaatataggtgaagctaccatttggccaagactatatgaagcaataacccagcccaaaaaactgtatcagctgtcggatcaatctgcagaaaaaggtacagtgctttaagaa

SEQ ID NO: 19635 - DNA, 119 bp, homo sapiens
cagtcccaacagcgcaggagactgaggggtccctccaccaggatccgctcacctgcttccaggtgtgtccctaagagcggctcctgttcactttcgttccgcaggccggccatagttac

SEQ ID NO: 19636 - DNA, 119 bp, homo sapiens
aggtgtgtcgcctaagagcggctcctgttcactttcgttccgcaggccggccatagttacactccctacaggcgtcttgcgcccaactctcgcgacacctgctttctcccatcccgggt

SEQ ID NO: 19637 - DNA, 119 bp, homo sapiens
actccctacaaggcgtcttgcgcccaactctcgcgacacctgctttctcccatcccgggtggcgtgaagtggcaaaacaagcctgtaagtgcgcgtgcgcacctgacggtcagacgtag

SEQ ID NO: 19638 - DNA, 119 bp, homo sapiens
ggtcgggtcaggccccagctgggcgcgagcgggtcggcgttgagggagccaccgccctcccgcctgcgcctgcctctcgcccccctccggccagcccgcagccggccgcgtcatgccag

SEQ ID NO: 19639 - DNA, 119 bp, homo sapiens
cgcctgcgcactgcctctcgcccccctccggccagcccgcagccggccgcgtcatgccaggcgctgctcgcggtagggagtgcccggggccgccgcctccgcccgcccgaagccgcgcc

SEQ ID NO: 19640 - DNA, 119 bp, homo sapiens
gcgctgctcggcggtagggagtgcccggggccgccgcctccgcccgcccgaagccgcgcccactgcccaagccagagggatggtggtagtcacggggcgggagccagacagccgtcgtc

SEQ ID NO: 19641 - DNA, 119 bp, homo sapiens
cactgcccagagccagagggatggtggtagtcacggggcgggagccagacagccgtcgtcaggacggtgcatgtccagctctgacgccgaagacgactttctggagccggccacgccga

SEQ ID NO: 19642 - DNA, 119 bp, homo sapiens
aggacggtgccatgtccagctctgacgccgaagacgactttctggagccggccacgccgacggccacgcggcggggcacgcgctgcccctgctgccacaggaggtacccgggcgggcgg

SEQ ID NO: 19643 - DNA, 119 bp, homo sapiens
ttgcctgcctgagagccctggtgatttctttccagtttcctgaggttgttccccttaacatcggaggggtcacttcactacacgcctgtccacactgcggtgctacgaagacaccatgt

SEQ ID NO: 19644 - DNA, 119 bp, homo sapiens
tcggaggggctcacttcactacacgcctgtccacactgcggtgctacgaagacaccatgttggcagccagttcagtgggcggcactacatccccacggactccgagggccggtacttca

SEQ ID NO: 19645 - DNA, 119 bp, homo sapiens
tggcagccatgttcagtgggcggcactacatccccacggactccgagggccggtacttcatcgaccgagtggcacacactttgggtatgtctctccctctacaatcaactttgtagtcc

SEQ ID NO: 19646 - DNA, 119 bp, homo sapiens
ttgtcaccgaccctctttccttcctgcttagagatgtgctgaatttcctgcgctcaggggacctcccaccagggagcgtgttcgagctgtgtacaaagaggcccagtactatgccatcg

SEQ ID NO: 19647 - DNA, 119 bp, homo sapiens
acctcccacccagggagcgtgttcgagctgtgtacaaagaggcccagtactatgccatcgggcccctccggagcagctggagaacatgcagccactgaagggcgagaaggtgcgccaag

SEQ ID NO: 19648 - DNA, 119 bp, homo sapiens
ggcccctcctggagcagctggagaacatgcagccactgaagggcgagaaggtgcgccaagcgtttctggactcatgccctattacaaaggtgagggtcagctgcccaggatggtgggta

SEQ ID NO: 19649 - DNA, 119 bp, homo sapiens
atccttatagaccacttggagcggattgtggagatcgcccggctgcgtgcggtccagcggaaggcccgcttgccaagctcaaggtctgtgtcttcaaggaggagatgcccatcaccccc

SEQ ID NO: 19650 - DNA, 119 bp, homo sapiens
aaggcccgctttgccaagctcaaggtctgtgtcttcaaggaggagatgcccatcaccccctatgagtgtcgctcctcaactccctgcgatttgagcggagtgagagtgacgggcagctt

SEQ ID NO: 19651 - DNA, 119 bp, homo sapiens
tatgagtgtccgctcctcaactccctgcgatttgagcggagtgagagtgacgggcagctttttgagcacactgtgaagtggatgtgtcttttgggccctgggaggctgtggctgatgtt

SEQ ID NO: 19652 - DNA, 119 bp, homo sapiens
tttgagcaccactgtgaagtggatgtgtcttttgggccctgggaggctgtggctgatgtttatgacctgtgcactgcctggtcacggacctctcggcccagggtctcaccgtggaccac

SEQ ID NO: 19653 - DNA, 119 bp, homo sapiens
tatgacctgctgcactgcctggtcacggacctctcggcccagggtctcaccgtggaccaccagtgcatcgggtgtgtgacaagcacctcgtgaaccactactactgcaagcgccccatc

SEQ ID NO: 19654 - DNA, 119 bp, homo sapiens
cagtgcatcggggtgtgtgacaagcacctcgtgaaccactactactgcaagcgccccatctatgagttcagatcacatggtggtgagtagccccggtaggcgagagtcccatcagggag

SEQ ID NO: 19655 - DNA, 119 bp, homo sapiens
tatgagttcaagatcacatggtggtgagtagccccggtaggcgagagtcccatcagggaggatgtccacttgcttggtggctctgggagtaagatccctgaaggggctgctgactgccc

SEQ ID NO: 19656 - DNA, 119 bp, homo sapiens
gatgtccaccttgcttggtggctctgggagtaagatccctgaaggggctgctgactgccccagaatctgcgaggtgagaacagcatcctgaggcacagctcccaggggacagaggtgta

SEQ ID NO: 19657 - DNA, 119 bp, homo sapiens
cagaatctgccgaggtgagaacagcatcctgaggcacagctcccaggggacagaggtgtagctccaatcccctgactgcacctcagggttgggctcagggcttgcggcctgcaggcact

SEQ ID NO: 19658 - DNA, 119 bp, homo sapiens
gctccaatctccctgactgcacctcagggttgggctcagggcttgcggcctgcaggcactccagccagcctcacctggcctttcctcaaggcatggtagtctttccttgaggctgatag

SEQ ID NO: 19659 - DNA, 119 bp, homo sapiens
ccagccagcgctcacctggcctttcctcaaggcatggtagtctttccttgaggctgatagctagggcttaccaggaagtcccgagaagttttgtcaccttcttgaccttgcaagagagt

SEQ ID NO: 19660 - DNA, 119 bp, homo sapiens
ctagggcttgaccaggaagtcccgagaagttttgtcaccttcttgaccttgcaagagagtttctgcccatttagagccacgttaccaaatcgatgtaggcctaatcacttcctcaaccc

SEQ ID NO: 19661 - DNA, 119 bp, homo sapiens
ttctgcccattttagagccacgttaccaaatcgatgtaggcctaatcacttcctcaaccctgttcaagctccctcccttgtgctcagtatattggtgtgaacacggaacatgatggggg

SEQ ID NO: 19662 - DNA, 119 bp, homo sapiens
tgttcaagcgtccctcccttgtgctcagtatattggtgtgaacacggaacatgatgggggatttacctgccagccaccccatagcccctggctgaagaagaaagagcatcttctctccc

SEQ ID NO: 19663 - DNA, 119 bp, homo sapiens
atttacctgaccagccaccccatagcccctggctgaagaagaaagagcatcttctctcccactgcacccttctcctccaagaatagttgcccacattcccaaaatgtggaaagactttt

SEQ ID NO: 19664 - DNA, 119 bp, homo sapiens
actgcaccccttctcctccaagaatagttgcccacattcccaaaatgtggaaagacttttcttttccttcggaacatgttcttcaccaccttttggagatttaaccatagctgccaaag

SEQ ID NO: 19665 - DNA, 119 bp, homo sapiens
cttttccttccggaacatgttcttcaccaccttttggagatttaaccatagctgccaaagctatgcaccagttggccttagaaaaccacaatgtttacagccctgtcttagggccgcgg

SEQ ID NO: 19666 - DNA, 119 bp, homo sapiens
ctatgcacccagttggccttagaaaaccacaatgtttacagccctgtcttagggccgcggcttctcttacttccaccaccttccttgcttgcagggttatcttctcacagggctggaat

SEQ ID NO: 19667 - DNA, 119 bp, homo sapiens
cttctcttatcttccaccaccttccttgcttgcagggttatcttctcacagggctggaatgcaaatttcgaggcttcttttgaagattccccaagtcaagcaggcaagatgcctagatc

SEQ ID NO: 19668 - DNA, 119 bp, homo sapiens
gcaaatttcagaggcttcttttgaagattccccaagtcaagcaggcaagatgcctagatcttctgttattttgacatgtaacatcctttttagaggctcagaacacctccttggctgct

SEQ ID NO: 19669 - DNA, 119 bp, homo sapiens
ttctgttatctttgacatgtaacatcctttttagaggctcagaacacctccttggctgctatctcatgtttagaatccagtttgtggtgaacctctttggaaggggaccccctctcttt

SEQ ID NO: 19670 - DNA, 119 bp, homo sapiens
atctcatgtgttagaatccagtttgtggtgaacctctttggaaggggaccccctctctttaaaccctgtcctctgtcctggtaacattctccttctaggagagcctctcttctgagaag

SEQ ID NO: 19671 - DNA, 119 bp, homo sapiens
aaaccctgttcctctgtcctggtaacattctccttctaggagagcctctcttctgagaaggtaaaggaaggctgggtgagacacacagctatcctaggagccgtaggaagacaaaactt

SEQ ID NO: 19672 - DNA, 119 bp, homo sapiens
gtaaaggaagggctgggtgagacacacagctatcctaggagccgtaggaagacaaaacttcccttttgtttactcctcactcctctatttttgttttactcacttctttatattttgtt

SEQ ID NO: 19673 - DNA, 119 bp, homo sapiens
cccttttgttttactcctcactcctctatttttgttttactcacttctttatattttgttttactcctcctcctgtatattttggtttacttactcctctatttcagaaattgaaaaag

SEQ ID NO: 19674 - DNA, 119 bp, homo sapiens
ttactcctcactcctgtatattttggtttacttactcctctatttcagaaattgaaaaagatccccaagatctgttactactgcatttccttcttgctctgtctacagcctaggccaac

SEQ ID NO: 19675 - DNA, 119 bp, homo sapiens
atccccaaggatctgttactactgcatttccttcttgctctgtctacagcctaggccaactagtcagggctggacatgcatctcctaaaggaagaactgtgtagcaccattgatcacaa

SEQ ID NO: 19676 - DNA, 119 bp, homo sapiens
tagtcagggtctggacatgcatctcctaaaggaagaactgtgtagcaccattgatcacaatgtaacattccatgctgcattaagggtgtctctctctaatcatgattgtacctgtctct

SEQ ID NO: 19677 - DNA, 119 bp, homo sapiens
tgtaacatttccatgctgcattaagggtgtctctctctaatcatgattgtacctgtctcttcctgggtaagggagatttttttttttaatgtgtaaagaattgatgcgagccaggaaca

SEQ ID NO: 19678 - DNA, 119 bp, homo sapiens
tcctgggtaaagggagatttttttttttaatgtgtaaagaattgatgcgagccaggaacatgtctgtagcccagctacttgggcacacgcctgtagtccaggccactcgagcacacacc

SEQ ID NO: 19679 - DNA, 119 bp, homo sapiens
ataaataaataaattggggaggacagcctcactggtatcagacttacaggaccagatagacaagatgggataaggggagctgaagtctgtgttcatatgaggaagagaagaccaagccc

SEQ ID NO: 19680 - DNA, 119 bp, homo sapiens
caagatgggtataaggggagctgaagtctgtgttcatatgaggaagagaagaccaagccctgggactttgctgaattcctccgtggggctggacggcagtgatctcctgttccctatgt

SEQ ID NO: 19681 - DNA, 119 bp, homo sapiens
tgggactttggctgaattcctccgtggggctggacggcagtgatctcctgttccctatgtgtaaacaaaattccagggcgtggttttgcactcctgttgtactcttttagaggtggaaa

SEQ ID NO: 19682 - DNA, 119 bp, homo sapiens
gtaaacaaagattccagggcgtggttttgcactcctgttgtactcttttagaggtggaaaagaggtggaactgagatctaagaggaaaggatagtcattcacgttctgagatatgcgct

SEQ ID NO: 19683 - DNA, 119 bp, homo sapiens
agaggtggatactgagatctaagaggaaaggatagtcattcacgttctgagatatgcgctctctctattttctcgtacacaaagggatagtctcttttctggagctgatgtccctgctt

SEQ ID NO: 19684 - DNA, 119 bp, homo sapiens
ctctctattgttctcgtacacaaagggatagtctcttttctggagctgatgtccctgcttggaggttagcccaaaacatggctcttgtattgttctaagagaaaaggctttcattttgg

SEQ ID NO: 19685 - DNA, 119 bp, homo sapiens
ggaggttagccccaaaacatggctcttgtattgttctaagagaaaaggctttcattttggttcttctgatggtgttacctactgcctaatatgtgttcattttttgacagagaggcaga

SEQ ID NO: 19686 - DNA, 119 bp, homo sapiens
ttcttctgattggtgttacctactgcctaatatgtgttcattttttgacagagaggcagactattgaaaagtctgtgtgaacagagagcagttcattaagcccattgctttcagtaatg

SEQ ID NO: 19687 - DNA, 119 bp, homo sapiens
ctattgaaaaagtctgtgtgaacagagagcagttcattaagcccattgctttcagtaatgtggccttgacccttctgcttcccccttctcccatggagcatggcagggcttggttattt

SEQ ID NO: 19688 - DNA, 119 bp, homo sapiens
tggccttgaccccttctgcttcccccttctcccatggagcatggcagggcttggttatttagagtccatcatgcaagccattgagagacttgtttgctcaaatgcaagtttgctcaaaa

SEQ ID NO: 19689 - DNA, 119 bp, homo sapiens
agagtccatacatgcaagccattgagagacttgtttgctcaaatgcaagtttgctcaaaaacaggtcctaaggcttgcttaggattacagggatgctgggtaagaacaccgttcctctc

SEQ ID NO: 19690 - DNA, 119 bp, homo sapiens
acaggtcctgaaggcttgcttaggattacagggatgctgggtaagaacaccgttcctctctctcgctgggaaatccctgtttctctgactccctttgtgatcctcacagtaatgtattc

SEQ ID NO: 19691 - DNA, 119 bp, homo sapiens
tctcgctggagaaatccctgtttctctgactccctttgtgatcctcacagtaatgtattctgtgccacttaggacacaaggctctgggccagtagaacaggcagagaggtgacactggg

SEQ ID NO: 19692 - DNA, 119 bp, homo sapiens
tgtgccactgtaggacacaaggctctgggccagtagaacaggcagagaggtgacactgggcagcaagctagagctctttctaaatggagtgaaggaattcagtggcctagtttcgccat

SEQ ID NO: 19693 - DNA, 119 bp, homo sapiens
cagcaagctgagagctctttctaaatggagtgaaggaattcagtggcctagtttcgccattctctaatggaaaccaaggccaggctgaaaagtgcaattagatgtggtggattgtggta

SEQ ID NO: 19694 - DNA, 119 bp, homo sapiens
tctctaatgagaaaccaaggccaggctgaaaagtgcaattagatgtggtggattgtggtaacggcctccgataaaggggttatccctgtggaagtgacttttccccatttgatcccttt

SEQ ID NO: 19695 - DNA, 119 bp, homo sapiens
acggcctccagataaaggggttatccctgtggaagtgacttttccccatttgatcccttttcaactctaatggccaggcccagaacagaagaagggttgggtctggaaggaaggctcca

SEQ ID NO: 19696 - DNA, 119 bp, homo sapiens
tcaactctaaatggccaggcccagaacagaagaagggttgggtctggaaggaaggctccaaaggatgaagcttctccctgatcataaggaagtgcatctttatagaattgttgtgcata

SEQ ID NO: 19697 - DNA, 119 bp, homo sapiens
aaggatgaaagcttctccctgatcataaggaagtgcatctttatagaattgttgtgcataatgtcagtaatccctctcacttgacaagggactggattcatcttgccttgagacgggcc

SEQ ID NO: 19698 - DNA, 119 bp, homo sapiens
atgtcagtaaatccctctcacttgacaagggactggattcatcttgccttgagacgggccagtagttatagtgagtcaaagcaaagtgaaagtttcaggagatgggaccaatggtgcaa

SEQ ID NO: 19699 - DNA, 119 bp, homo sapiens
agtagttatcagtgagtcaaagcaaagtgaaagtttcaggagatgggaccaatggtgcaatgctcgccaaacaaaattccttaaaaataaaaaagctaatgttatagcaacaaaaaaag

SEQ ID NO: 19700 - DNA, 119 bp, homo sapiens
tgctcgccataacaaaattccttaaaaataaaaaagctaatgttatagcaacaaaaaaagactgaagcaaaccacactgaaatgcatcccactccaggagaggaattcttagcgtaaca

SEQ ID NO: 19701 - DNA, 119 bp, homo sapiens
actgaagcaaaaccacactgaaatgcatcccactccaggagaggaattcttagcgtaacactctaaataatggaaggaatcatcaccttccttattttacctctgccttgttcaccagg

SEQ ID NO: 19702 - DNA, 119 bp, homo sapiens
ctctaaataaatggaaggaatcatcaccttccttattttacctctgccttgttcaccaggctgcccagtcttaccatgcagaaagcagtcagctgtactctggaagtttctgttcttct

SEQ ID NO: 19703 - DNA, 119 bp, homo sapiens
ctgcccagtgcttaccatgcagaaagcagtcagctgtactctggaagtttctgttcttctttcctggggttaggatattctgggagctgtctgagccttgtgcctaaggcttatcaggt

SEQ ID NO: 19704 - DNA, 119 bp, homo sapiens
ttcctggggcttaggatattctgggagctgtctgagccttgtgcctaaggcttatcaggtgatataatctcctgttctgggctgcttgctggaggaataggaagtgacatttataagac

SEQ ID NO: 19705 - DNA, 119 bp, homo sapiens
gatataatcttcctgttctgggctgcttgctggaggaataggaagtgacatttataagacacaggcggttgagcatccatgtgtggtcttggtctaaaccagctcttgaacaggttaaa

SEQ ID NO: 19706 - DNA, 119 bp, homo sapiens
acaggcggtgtgagcatccatgtgtggtcttggtctaaaccagctcttgaacaggttaaagcaaacagcataacaaaacaaaaactactgatgctgagcgttttgatcctagtaatatt

SEQ ID NO: 19707 - DNA, 119 bp, homo sapiens
gcaaacagcaataacaaaacaaaaactactgatgctgagcgttttgatcctagtaatatttcaaatatttccttctgcatatgttctatccatatttgattccaatatacattattaag

SEQ ID NO: 19708 - DNA, 119 bp, homo sapiens
tcaaatattgtccttctgcatatgttctatccatatttgattccaatatacattattaagctttcttggtactattttgctggggctcttgcgtgaaggtggtacctgtctcatgatcc

SEQ ID NO: 19709 - DNA, 119 bp, homo sapiens
ctttcttgggtactattttgctggggctcttgcgtgaaggtggtacctgtctcatgatccttaaaagaggaggcttttttcatccaaagctgtagtgttgggaactggggtgggagagg

SEQ ID NO: 19710 - DNA, 119 bp, homo sapiens
ttaaaagagagaggcttttttcatccaaagctgtagtgttgggaactggggtgggagaggcactttttgaattctgaaagaatcatatctgtgtatatacatactgagtggggaaggat

SEQ ID NO: 19711 - DNA, 119 bp, homo sapiens
cactttttggaattctgaaagaatcatatctgtgtatatacatactgagtggggaaggatgggggttggaggggttgagggaggtgggaacaaacagtgagtatgggaacaggcagtca

SEQ ID NO: 19712 - DNA, 119 bp, homo sapiens
gggggttggcaggggttgagggaggtgggaacaaacagtgagtatgggaacaggcagtcacctcgagtggggaggtcacctgggtccgtcgtcttccttctgtatggtgttgggtttat

SEQ ID NO: 19713 - DNA, 119 bp, homo sapiens
cctcgagtgtgggaggtcacctgggtccgtcgtcttccttctgtatggtgttgggtttatgtacacacttaacacttcctgtgtgagttcatgtacctgtctgtgagtgctttggtgta

SEQ ID NO: 19714 - DNA, 119 bp, homo sapiens
gtacacactataacacttcctgtgtgagttcatgtacctgtctgtgagtgctttggtgtattgagcctcgtacactccaagggcattaaagtcaagaactagaacctgggtgctgtgcc

SEQ ID NO: 19715 - DNA, 119 bp, homo sapiens
ttgagcctcagtacactccaagggcattaaagtcaagaactagaacctgggtgctgtgcctttctttttagagatgtgctctcatctcttctctgacccccactttgccagcaaatatt

SEQ ID NO: 19716 - DNA, 119 bp, homo sapiens
tttcttttttagagatgtgctctcatctcttctctgacccccactttgccagcaaatattttttatttcgcttaaaatgtggtgtgtttggggatgccccacacaacaagacaggcttt

SEQ ID NO: 19717 - DNA, 119 bp, homo sapiens
ttttatttctgcttaaaatgtggtgtgtttggggatgccccacacaacaagacaggcttttccctgagacagcagctgaatttctgccctgaaagggaggtgggcctcttgaggaccct

SEQ ID NO: 19718 - DNA, 119 bp, homo sapiens
gaacgcgcgtgcgcgggcggtgtttgaggccggccagtcgtgactgggcggcaatgaggtcagtgactgcgggagtcctgcaggggcggggcggcgccaagcgcagggagcccggctga

SEQ ID NO: 19719 - DNA, 119 bp, homo sapiens
cagtgactgccgggagtcctgcaggggcggggcggcgccaagcgcagggagcccggctgagtggcagccaggtgagcgctcagggagcccgggtgagggccgggaacccaggtgagggg

SEQ ID NO: 19720 - DNA, 119 bp, homo sapiens
acacaaaatgaatgatctttcttttagattgaagatggatacgtgacaatcccagggaccgctgcactgcttcatttccttagacaagacacagtgtagggcccggcccgtgttggccc

SEQ ID NO: 19721 - DNA, 119 bp, homo sapiens
gctgcactgacttcatttccttagacaagacacagtgtagggcccggcccgtgttggccccaggactccttggaatatagctgtggacaatgaatcctgcgagcgatgggggcacatca

SEQ ID NO: 19722 - DNA, 119 bp, homo sapiens
caggactcctttggaatatagctgtggacaatgaatcctgcgagcgatgggggcacatcagagagcattttgacctggactatgcatcctgggggatccgctccacgctgatggtcgct

SEQ ID NO: 19723 - DNA, 119 bp, homo sapiens
gagagcatttttgacctggactatgcatcctgggggatccgctccacgctgatggtcgctggctttgtctctacttgggcgtctttgtggtctgccaccagctgtcctcttccctgaat

SEQ ID NO: 19724 - DNA, 119 bp, homo sapiens
ggctttgtcttctacttgggcgtctttgtggtctgccaccagctgtcctcttccctgaatgccacttacgttctttggtggccagagagaaggtcttctgggacctggcggccacgcgt

SEQ ID NO: 19725 - DNA, 119 bp, homo sapiens
gccacttaccgttctttggtggccagagagaaggtcttctgggacctggcggccacgcgtgcagtctttgtgttcagagcacagccgcaggcctgtgggctctgctgggggaccctgtg

SEQ ID NO: 19726 - DNA, 119 bp, homo sapiens
gcagtctttggtgttcagagcacagccgcaggcctgtgggctctgctgggggaccctgtgctgcatgccacaaggcgcgtggccagcagaactggtgctggtttcacatcacgacagca

SEQ ID NO: 19727 - DNA, 119 bp, homo sapiens
ctgcatgccgacaaggcgcgtggccagcagaactggtgctggtttcacatcacgacagcaacgggattctttgctttgaaaatgttgcagtccacctgtccaacttgatcttccggaca

SEQ ID NO: 19728 - DNA, 119 bp, homo sapiens
acgggattcttttgctttgaaaatgttgcagtccacctgtccaacttgatcttccggacatttgacttgttctggttatccaccatctctttgcctttcttgggtttcttggctgcttg

SEQ ID NO: 19729 - DNA, 119 bp, homo sapiens
tttgacttgtttctggttatccaccatctctttgcctttcttgggtttcttggctgcttggtcaatctcaagctggccactatctagctatgaccacgttgctcctggagatgagcacg

SEQ ID NO: 19730 - DNA, 119 bp, homo sapiens
gtcaatctccaagctggccactatctagctatgaccacgttgctcctggagatgagcacgccctttaccgcgtttcctggatgctcttaaaggtaagtgcatgcatcagcagaagatga

SEQ ID NO: 19731 - DNA, 119 bp, homo sapiens
ccatgcaggcgggctggtccgagtctctgttttggaagctcaaccagtggctgatgattcacatgtttcctgccgcatggttctaacctaccacatgtggtgggtgtgtttctggcact

SEQ ID NO: 19732 - DNA, 119 bp, homo sapiens
acatgtttcactgccgcatggttctaacctaccacatgtggtgggtgtgtttctggcactgggacggccggtcagcagcctgtatctgcctcatttgacactgttccttgtcggactgg

SEQ ID NO: 19733 - DNA, 119 bp, homo sapiens
gggacggcctggtcagcagcctgtatctgcctcatttgacactgttccttgtcggactggctctgcttagctaatcattaatccatattggacccataagaagactcagcagcttctca

SEQ ID NO: 19734 - DNA, 119 bp, homo sapiens
ctctgcttacgctaatcattaatccatattggacccataagaagactcagcagcttctcaatccggtggctggaacttcgcacagccagaagccaagagcaggccagaaggcaacgggc

SEQ ID NO: 19735 - DNA, 119 bp, homo sapiens
atccggtggactggaacttcgcacagccagaagccaagagcaggccagaaggcaacgggcagctgctgcgaagaagaggccatagctgctccagccggggctccggggcggcagcagag

SEQ ID NO: 19736 - DNA, 119 bp, homo sapiens
agctgctgcggaagaagaggccatagctgctccagccggggctccggggcggcagcagagctggcacacgattctgggaagccccgcgaatgatggcttttgaattaatgaggcagtga

SEQ ID NO: 19737 - DNA, 119 bp, homo sapiens
ctggcacaccgattctgggaagccccgcgaatgatggcttttgaattaatgaggcagtgaatgttttgttttacttctaagggaaatactaactttctttcgcattagtattaattttg

SEQ ID NO: 19738 - DNA, 119 bp, homo sapiens
atgttttgtgtttacttctaagggaaatactaactttctttcgcattagtattaattttgaagtagctaaaagtatttttaagaaattataattttatgactgtctggcaggctctgtc

SEQ ID NO: 19739 - DNA, 119 bp, homo sapiens
aagtagctacaaagtatttttaagaaattataattttatgactgtctggcaggctctgtcagtttagcccgccggaccgtgtcaagcatctaggagaggagtccatggtgtccaggcat

SEQ ID NO: 19740 - DNA, 119 bp, homo sapiens
agtttagccgcgccggaccgtgtcaagcatctaggagaggagtccatggtgtccaggcatcggggcgtccacctgttgaggagtggggtggctttgaatgctggaaatggcttcatagt

SEQ ID NO: 19741 - DNA, 119 bp, homo sapiens
cggggcgtcacacctgttgaggagtggggtggctttgaatgctggaaatggcttcatagtgaagtgcctccacagggcgggtgggtcagcgttgactctttccagctgcacactcatat

SEQ ID NO: 19742 - DNA, 119 bp, homo sapiens
gaagtgcctcccacagggcgggtgggtcagcgttgactctttccagctgcacactcatatgccgtgtgtttattcagaagtcacattcttttcagttggagagaattgggctaagatag

SEQ ID NO: 19743 - DNA, 119 bp, homo sapiens
gccgtgtgtcttattcagaagtcacattcttttcagttggagagaattgggctaagatagaaaataacagatttgttccttattaaagcttcccagcgtatgaaattctaagctgggtg

SEQ ID NO: 19744 - DNA, 119 bp, homo sapiens
aaaaaaaaaaaaaaaaattctagaccgaagtgtacggcagtgccatctggtggcaagtggtacaaagacacgctgaggggtagtgactcctgtagcagcagagacgccttggagtttaa

SEQ ID NO: 19745 - DNA, 119 bp, homo sapiens
tacaaagacaacgctgaggggtagtgactcctgtagcagcagagacgccttggagtttaacccccaccaccagagcgtgggctggtaaagatgaaatcttgcaagtttttttttttttt

SEQ ID NO: 19746 - DNA, 119 bp, homo sapiens
cccccaccaaccagagcgtgggctggtaaagatgaaatcttgcaagttttttttttttttaaatcatggacctgttttaaaatgagaagttattattcatactgtgttgctcatttgac

SEQ ID NO: 19747 - DNA, 119 bp, homo sapiens
aaatcatggtacctgttttaaaatgagaagttattattcatactgtgttgctcatttgacaaaataaggaaggatttcataatcaggttgtctgggtttcagagctgtttttaattgac

SEQ ID NO: 19748 - DNA, 119 bp, homo sapiens
aaaataaggtaaggatttcataatcaggttgtctgggtttcagagctgtttttaattgactgagttaccacaggcacccaatctagaccctaattctgtggttggtgttcctctgtaga

SEQ ID NO: 19749 - DNA, 119 bp, homo sapiens
tgagttacctacaggcacccaatctagaccctaattctgtggttggtgttcctctgtagatttcaagacagtagtgatgtcattttctccctgagctgtagggtggacctggacccctc

SEQ ID NO: 19750 - DNA, 119 bp, homo sapiens
tttcaagacaagtagtgatgtcattttctccctgagctgtagggtggacctggacccctcagagatgctgactgcagggtcctggggtccctagagtggtcctgcagcagcccctggca

SEQ ID NO: 19751 - DNA, 119 bp, homo sapiens
agagatgctcgactgcagggtcctggggtccctagagtggtcctgcagcagcccctggcaatgagctgctgatgatgagtcccaaggtacattgttctactgttttatacccaggtaga

SEQ ID NO: 19752 - DNA, 119 bp, homo sapiens
atgagctgcctgatgatgagtcccaaggtacattgttctactgttttatacccaggtagaagttacacacaatttagcaatgttgttaacagacatacagaattgtgtgtgtgtgtgtg

SEQ ID NO: 19753 - DNA, 119 bp, homo sapiens
aacgtgcaattaaaattcaaagtttattttttatcacaagcacctttgaaatgtacgtggaaaacgtcgctgctcgtgagaatcatgtgtgacttacgttccttatgttttatggaact

SEQ ID NO: 19754 - DNA, 119 bp, homo sapiens
gccacttcacccggcccggagcggtgtattttgattgctggtgctttaactatattgaccaaggtgtatgtaacctatttatcacattttacgaagcaattttaatcttaaacacatcc

SEQ ID NO: 19755 - DNA, 119 bp, homo sapiens
aaggtgtatagtaacctatttatcacattttacgaagcaattttaatcttaaacacatccagcaaatgggtccctgctgaaacttttaactggaaacctcacacctggcaggcagcact

SEQ ID NO: 19756 - DNA, 119 bp, homo sapiens
agcaaatggtgtccctgctgaaacttttaactggaaacctcacacctggcaggcagcactctctgcagcgtgcccttgtggagtcagcaggagctggtgtttttcagccagacagaggc

SEQ ID NO: 19757 - DNA, 119 bp, homo sapiens
ctctgcagccgtgcccttgtggagtcagcaggagctggtgtttttcagccagacagaggcataataaaggactgatgtttacagaacccaaatgatgtcttcctctctctcaaaataaa

SEQ ID NO: 19758 - DNA, 119 bp, homo sapiens
ataataaagtgactgatgtttacagaacccaaatgatgtcttcctctctctcaaaataaactaacctatcatattgctgtgaatgctttatcttggagatagaaaatataatgataaat

SEQ ID NO: 19759 - DNA, 119 bp, homo sapiens
ctaacctattcatattgctgtgaatgctttatcttggagatagaaaatataatgataaattcatcatgtttcagaattcgatttggagttggaagtggacagcctaatttttatctcac

SEQ ID NO: 19760 - DNA, 119 bp, homo sapiens
tcatcatgtgttcagaattcgatttggagttggaagtggacagcctaatttttatctcacctccactagactttgaccttcccaggggtccacactttacctcctgtatcttcatacgc

SEQ ID NO: 19761 - DNA, 119 bp, homo sapiens
ctccactaggactttgaccttcccaggggtccacactttacctcctgtatcttcatacgcgtgtgtggagcatagagatggaggtgctgtagagaagcacaggctcacccgctccgtcc

SEQ ID NO: 19762 - DNA, 119 bp, homo sapiens
gtgtgtggatgcatagagatggaggtgctgtagagaagcacaggctcacccgctccgtccagtgtcaccacacattggtccggggacccctcagtgcagagcctgaagttgggggttta

SEQ ID NO: 19763 - DNA, 119 bp, homo sapiens
agtgtcacccacacattggtccggggacccctcagtgcagagcctgaagttgggggtttaggggtggaaaggcttcgtgaaatgttaatgatgcgtacaccttccagatggcacagcac

SEQ ID NO: 19764 - DNA, 119 bp, homo sapiens
ggggtggaaaaggcttcgtgaaatgttaatgatgcgtacaccttccagatggcacagcactttcccatgtcctcactggcctcagtctccctgaccggcagtgtgaggggatgtagcta

SEQ ID NO: 19765 - DNA, 119 bp, homo sapiens
tttcccatggtcctcactggcctcagtctccctgaccggcagtgtgaggggatgtagctatagtggagctggtacaagcgacattcatgagctctgacttcttggtgccaggttggtgt

SEQ ID NO: 19766 - DNA, 119 bp, homo sapiens
tagtggagcatggtacaagcgacattcatgagctctgacttcttggtgccaggttggtgtgagcctgggccggcccactcagcggcccacattggccagcattcagctgcacgtgtgtg

SEQ ID NO: 19767 - DNA, 119 bp, homo sapiens
gagcctgggcccggcccactcagcggcccacattggccagcattcagctgcacgtgtgtgctgcgtgctcacatcctctattgagagttacagcaagtgttaaacgaggtgagttcaca

SEQ ID NO: 19768 - DNA, 119 bp, homo sapiens
ctgcgtgcttcacatcctctattgagagttacagcaagtgttaaacgaggtgagttcacataacaggaatctggaactgcttgaaaactaggacgattgggcaatatcggccttaactc

SEQ ID NO: 19769 - DNA, 119 bp, homo sapiens
taacaggaattctggaactgcttgaaaactaggacgattgggcaatatcggccttaactccacctgatgcaggtgacccggatagaaaatggccctgcgtttagccaggatgtggctct

SEQ ID NO: 19770 - DNA, 119 bp, homo sapiens
cacctgatggcaggtgacccggatagaaaatggccctgcgtttagccaggatgtggctctccagcttggttcagtgtgatcacttgtcagtgcgctttctctttcgatagtgaaatcct

SEQ ID NO: 19771 - DNA, 119 bp, homo sapiens
ccagcttggcttcagtgtgatcacttgtcagtgcgctttctctttcgatagtgaaatccttctctatactatgttttgttttgtttcttaagttgggaaacagaatgggccagggaggt

SEQ ID NO: 19772 - DNA, 119 bp, homo sapiens
tctctatacctatgttttgttttgtttcttaagttgggaaacagaatgggccagggaggttgagtgactaagaccaagggttggtgcagcctcctcgccgcgctgcgggggctgggccg

SEQ ID NO: 19773 - DNA, 119 bp, homo sapiens
tgagtgactgaagaccaagggttggtgcagcctcctcgccgcgctgcgggggctgggccgcacaggctttgcccttctcggtgtccaggctccttgggtgatgctggagttgtcatggc

SEQ ID NO: 19774 - DNA, 119 bp, homo sapiens
cacaggcttctgcccttctcggtgtccaggctccttgggtgatgctggagttgtcatggccgcagttcatgtgagattttttaccaggtattgcgcttaagggacatgattttccattt

SEQ ID NO: 19775 - DNA, 119 bp, homo sapiens
gctcagagaggtgatgacgtgcccaaggtgacgcaactcgtgaacagccgtgcctgccttgggcgcagctccggcgccagagctgggctcttcaacacggcatttagcgcagaaagtcg

SEQ ID NO: 19776 - DNA, 119 bp, homo sapiens
gctgattagtttctgctgggaacactgcatcctcacgtggtggaggggatggaaggtcaacaggcctcactagttctccgctgcctttttatgaggcattaagccatttgcaagagtag

SEQ ID NO: 19777 - DNA, 119 bp, homo sapiens
tcttaataccaccgcaatgacaattacaatgtcatgtgaattctggaggggacacggtcacactgcagctcagcacccggtgaatgtggttctcttcccatgtccgaattttgtgagct

SEQ ID NO: 19778 - DNA, 119 bp, homo sapiens
cactgcagcatcagcacccggtgaatgtggttctcttcccatgtccgaattttgtgagctccacacgggagggttgcatctgttttattctctgattgattctaagccccatgtccctg

SEQ ID NO: 19779 - DNA, 119 bp, homo sapiens
ccacacgggcagggttgcatctgttttattctctgattgattctaagccccatgtccctggcacaggatgctgcttggcagtagggagtggatgaaccagtagtacccagggctgccag

SEQ ID NO: 19780 - DNA, 119 bp, homo sapiens
gcacaggatggctgcttggcagtagggagtggatgaaccagtagtacccagggctgccaggcagggcccgcaggggacagacccaagggctgatatggggacacctgctgaggggggaa

SEQ ID NO: 19781 - DNA, 119 bp, homo sapiens
gcagggccctgcaggggacagacccaagggctgatatggggacacctgctgaggggggaatttaccacgtaagggcagggctgggaggctgggcagccagtttcaccctcgcacaggct

SEQ ID NO: 19782 - DNA, 119 bp, homo sapiens
tttaccacggtaagggcagggctgggaggctgggcagccagtttcaccctcgcacaggctgcctggcaaaccagcggctggaggtgatgtcctcagtagagaacggtggccactggaaa

SEQ ID NO: 19783 - DNA, 119 bp, homo sapiens
gcctggcaagaccagcggctggaggtgatgtcctcagtagagaacggtggccactggaaacgtgtggccgaaggggaaacgctcgggcctctggtgggggccagcctggggtggggtcg

SEQ ID NO: 19784 - DNA, 119 bp, homo sapiens
cgtgtggccagaaggggaaacgctcgggcctctggtgggggccagcctggggtggggtcggccagggtcgctgcctttccttcatgctggggaggagatgttgtgtgcatgtgagaaag

SEQ ID NO: 19785 - DNA, 119 bp, homo sapiens
gccagggtcagctgcctttccttcatgctggggaggagatgttgtgtgcatgtgagaaagcatttgatacatgccaaaagtttcctccattatgtgcgtgtcaagtgtttgaccaggtc

SEQ ID NO: 19786 - DNA, 119 bp, homo sapiens
catttgatagcatgccaaaagtttcctccattatgtgcgtgtcaagtgtttgaccaggtcagaactcttttctatgcgaatgtgctcacgcagacagaagcggaggggctccgtcgctc

SEQ ID NO: 19787 - DNA, 119 bp, homo sapiens
agaactcttgttctatgcgaatgtgctcacgcagacagaagcggaggggctccgtcgctctgccctcacccgctgaaccgcgagggtctcccgctcctcaggcttgcggctcggccgcg

SEQ ID NO: 19788 - DNA, 119 bp, homo sapiens
tgccctcacgccgctgaaccgcgagggtctcccgctcctcaggcttgcggctcggccgcgaagtgtgtcggtgtgcatcctgggtgctcctttgtgctctgtcctacggtgacacaggc

SEQ ID NO: 19789 - DNA, 119 bp, homo sapiens
aagtgtgtcaggtgtgcatcctgggtgctcctttgtgctctgtcctacggtgacacaggcggcgtggggtagacaggtaccggtcagactacggtgacacaggcggcgtgcggttagac

SEQ ID NO: 19790 - DNA, 119 bp, homo sapiens
ggcgtggggttagacaggtaccggtcagactacggtgacacaggcggcgtgcggttagacaggtaccggcagattacggtggcacaggcggcgtggggttagacaggtaccggtcagat

SEQ ID NO: 19791 - DNA, 119 bp, homo sapiens
aggtaccggtcagattacggtggcacaggcggcgtggggttagacaggtaccggtcagattacggtggccaggcggcgtggggttagacaggtaccggtcagattacggtggcacaggc

SEQ ID NO: 19792 - DNA, 119 bp, homo sapiens
tacggtggcacaggcggcgtggggttagacaggtaccggtcagattacggtggcacaggcggcgtggggtagacaggtaccggtcagattacggtggcacaggcggcgtggggttagac

SEQ ID NO: 19793 - DNA, 119 bp, homo sapiens
ggcgtggggttagacaggtaccggtcagattacggtggcacaggcggcgtggggttagacaggtaccggcagattacggtggcacaggcagcgtggggttagacaggtaccggtcagat

SEQ ID NO: 19794 - DNA, 119 bp, homo sapiens
aggtaccggtcagattacggtggcacaggcagcgtggggttagacaggtaccggtcagattacggtggccaggcggcgtggggttagacaggtaccggtcagattacggtggcacaggc

SEQ ID NO: 19795 - DNA, 119 bp, homo sapiens
tacggtggcacaggcggcgtggggttagacaggtaccggtcagattacggtggcacaggcggcgtggggtagacaggtaccggtcagattacggtgacacaggcggcgtggggttagac

SEQ ID NO: 19796 - DNA, 119 bp, homo sapiens
ggcgtggggttagacaggtaccggtcagattacggtgacacaggcggcgtggggttagacaggtaccggcagattacggtggcacaggctgcgtggggttagacaggtaccggtcagat

SEQ ID NO: 19797 - DNA, 119 bp, homo sapiens
aggtaccggtcagattacggtggcacaggctgcgtggggttagacaggtaccggtcagattacggtggccaggcggcgtggggttagacaggtactggtcagatgcacgggctccctaa

SEQ ID NO: 19798 - DNA, 119 bp, homo sapiens
tacggtggcacaggcggcgtggggttagacaggtactggtcagatgcacgggctccctaaacccctgcttggcttcggcagtaaagacaggacgcacccatgtcacaagaggagcacag

SEQ ID NO: 19799 - DNA, 119 bp, homo sapiens
acccctgctgtggcttcggcagtaaagacaggacgcacccatgtcacaagaggagcacaggcaggggtgtggtgttggggcagccctcagggtctccagaccccagccccactcacaca

SEQ ID NO: 19800 - DNA, 119 bp, homo sapiens
gcaggggtgttggtgttggggcagccctcagggtctccagaccccagccccactcacacagcagcctagaaggaagggcagagtcccaggtgtcagctggtgggtctcccaggagctgc

SEQ ID NO: 19801 - DNA, 119 bp, homo sapiens
gcagcctaggaaggaagggcagagtcccaggtgtcagctggtgggtctcccaggagctgcccctccctgaagtcacaggacaggaatgacagatcagggaactgcaggaagctgccacc

SEQ ID NO: 19802 - DNA, 119 bp, homo sapiens
ccctccctggaagtcacaggacaggaatgacagatcagggaactgcaggaagctgccacctctggggtcgaatatgcccagcctgcgggggctctctatcggggtcttcgagagccaga

SEQ ID NO: 19803 - DNA, 119 bp, homo sapiens
tctggggtcagaatatgcccagcctgcgggggctctctatcggggtcttcgagagccagacagcctgcctgtgctgcatacctggctttgctctgtgcagaacccagcacacgtgattt

SEQ ID NO: 19804 - DNA, 119 bp, homo sapiens
cagcctgccttgtgctgcatacctggctttgctctgtgcagaacccagcacacgtgattttgtgtgacagccagcagcctggctcccaggacaggaggcctgccctgggggaggggctg

SEQ ID NO: 19805 - DNA, 119 bp, homo sapiens
tgtgtgacatgccagcagcctggctcccaggacaggaggcctgccctgggggaggggctgcaggaggaggggggcaggcacccatgagtctgtccagccttgtcacagatgcatcgccc

SEQ ID NO: 19806 - DNA, 119 bp, homo sapiens
caggaggagggggggcaggcacccatgagtctgtccagccttgtcacagatgcatcgcccaccctgcggcctgatttcagctcacctcagagtaaatcagaataaactgcacccagact

SEQ ID NO: 19807 - DNA, 119 bp, homo sapiens
accctgcggtcctgatttcagctcacctcagagtaaatcagaataaactgcacccagactttcacgaatcatgttgacgctttcagttcacccctttctttgctaactttcttcctatt

SEQ ID NO: 19808 - DNA, 119 bp, homo sapiens
ttcacgaatgcatgttgacgctttcagttcacccctttctttgctaactttcttcctattttcttctaagcgagagcttattaattccatatttatcattttgaataacttttctcctt

SEQ ID NO: 19809 - DNA, 119 bp, homo sapiens
ttcttctaatgcgagagcttattaattccatatttatcattttgaataacttttctcctttttagtaacaaatgtacttcactcttagtaaaatgtatttactattttagtaacaaaaa

SEQ ID NO: 19810 - DNA, 119 bp, homo sapiens
tttagtaacaaaatgtacttcactcttagtaaaatgtatttactattttagtaacaaaaatatacttgctaatcatgtttaaaatatagtgatgtgaaaaattcagacgtctctatttc

SEQ ID NO: 19811 - DNA, 119 bp, homo sapiens
tgaactgaggatcccccatcctcactcttaccctgcatccatccacacaaacacacgtacctggtatgaggccgtgggaacacattgctgaagccaccaccactgatatagtcaacaat

SEQ ID NO: 19812 - DNA, 119 bp, homo sapiens
ttcatttgtgatgaggaaaggttcctggaaggatgtgcctcccactgtggtgacataggggctgagggggaagacagcatttggatagtaggggacccaaggggacctccaagatatgt

SEQ ID NO: 19813 - DNA, 119 bp, homo sapiens
ctgagtggtaggctagagtacttacctggaggcagggaaggtagggcggaactggtgtcttccagagacgaccaacacccggccccactgtcacctgagagagaccaagtgtagcattc

SEQ ID NO: 19814 - DNA, 119 bp, homo sapiens
gcagtctgtgctaagtcaactcacgtcctccgctggtcgggctccgggctgtaactgcatttgccagagggatgagggcaaagagccctaggaggctgtaggggcagcaggtgggtttc

SEQ ID NO: 19815 - DNA, 119 bp, homo sapiens
cgagccctctcaatttctcaccaggcttggagtcccattctgcccttccgcggatctgctgtcatgtgaggatcacatgagctctatattccaccaccactacccctctgcctagtaac

SEQ ID NO: 19816 - DNA, 119 bp, homo sapiens
ccctgggatagacagatgggcccatcactcaccacatgcagtgacccaggtactcatcataatagtagacagctcaaaggagtcgatctgagggaggaacgggcagggcagagtcgggg

SEQ ID NO: 19817 - DNA, 119 bp, homo sapiens
tgggacagtaccttgagcaagagaaagggcgtgatgacgttgtaggccatgtggaagtagtccccaacatgggcttgttgagtggaaaccactcgagagggaataccagctgcggagca

SEQ ID NO: 19818 - DNA, 119 bp, homo sapiens
caccatggcaatgggacgcccaaagtccagaacccagttctgcagtgtgaagtagaaccagaggtcgagtggaagggagccgtgcgggcagcctcatcagcgctcacagagccatgcct

SEQ ID NO: 19819 - DNA, 119 bp, homo sapiens
tttctctgtgttccacaggccgtggcatgcggggatggccatcactgctgcccacggggcttccactgcgtgcagacgggcgatcctgcttccaaagatcaggtgcagctggggtgtgg

SEQ ID NO: 19820 - DNA, 119 bp, homo sapiens
acaggtaacaactccgtgggtgccatccagtgccctgatagtcagttcgaatgcccggacttctccacggctgtgttatggtcgatggctcctgggggtgctgccccatgccccaggta

SEQ ID NO: 19821 - DNA, 119 bp, homo sapiens
tccagtggccttgtccagctcggtcatgtgtccggacgcacggtcccggtgccctgatggttctacctgtgtgagctgcccagtgggaagtatggctgctgcccaatgcccaacgtgag

SEQ ID NO: 19822 - DNA, 119 bp, homo sapiens
ttccctcacagtgggggatgtgaaatgtgacatggaggtgagctgcccagatggctatacctgctgccgctacagtcgggggcctggggctgctgcccttttacccaggtacccagggg

SEQ ID NO: 19823 - DNA, 119 bp, homo sapiens
caagatagactccctgccagttacctgtgtgtacagggaggtctcctgtaagggaatggtttccttggctggccacttctgtaaaatccaaaccactgcagaagaagcaaaggaaagaa

SEQ ID NO: 19824 - DNA, 119 bp, homo sapiens
tagtgtctcacctccgaatctacagggtccacaatggaatcattgaggaatttcaccatcacaaacttctcagggccatcaggtttttcttgtaggactcattgataccctgaaagaaa

SEQ ID NO: 19825 - DNA, 119 bp, homo sapiens
ggtttgggtgcttacccgctcctgatttatatctgccaagaagatgctgtggttgcgatacacatcctctttatggggtcatgccagtattcggcttgcacgaggctgtaggaaaaaaa

SEQ ID NO: 19826 - DNA, 119 bp, homo sapiens
catacataccgttcctgaacaactttggagtacgccccagcattcagtgtttttcggatgaagtcacagtgtgagagctctctcctgggcatcgagggagtccaaaaacacctacagtg

SEQ ID NO: 19827 - DNA, 119 bp, homo sapiens
aaagaaagcaaagaggcaaagttaccttgatgttgtcccccaaccgagatcagattgatcatgggaggtaagggcatctctgagccactgccctcctacggaataaaagggagttttag

SEQ ID NO: 19828 - DNA, 119 bp, homo sapiens
cttacctccatcagggtcttcccaatctctaaagataagacgtaaattccaggtattttcttctccacctttttttaatagcacccatgcttaagggattgcaacagctgtctcctagc

SEQ ID NO: 19829 - DNA, 119 bp, homo sapiens
ggctataccttcccactgtattttgggaaattgatttccccaaggtaacaagataaagaagccaacccaacaacgatgagtcctcccagtagaatagcacgctcgccaatcctgttaaa

SEQ ID NO: 19830 - DNA, 119 bp, homo sapiens
acttacgtttcaaaaagggcaaagataaatagagtcacaaaaaacagaacattgatggccacaacagcacctggtcaatatttccttggggaacctgagcttcatctgtacttgctata

SEQ ID NO: 19831 - DNA, 119 bp, homo sapiens
tatattaattcagccaaatgggttaaaagtaccttcttcaaaattaatacttttacactgtcttcctgatcatccacacgatgttctcttaaaaagaaaaacacaaatattgtacctat

SEQ ID NO: 19832 - DNA, 119 bp, homo sapiens
tacctggacctagaataaaacctaatgcttgacacatgcttatgtttgccatggaacttgttctttcctaagggaagtagcaccagcagtatatgatctaacaactgctacatttcctt

SEQ ID NO: 19833 - DNA, 119 bp, homo sapiens
tgtagctataagggaaaaatagattgaaatgtacaaaccttttggagatatggccatatggacatcatcctacagaaaaccctgtgaagaagcaaactaggttatttatacttataata

SEQ ID NO: 19834 - DNA, 119 bp, homo sapiens
tttctaatacttacctacactgctgagaaacatagtaagatataaaatcctaatagatctccatcggctttataatgctcttcagtctctaaaatgtcccattctctaggtgtaaagaa

SEQ ID NO: 19835 - DNA, 119 bp, homo sapiens
tgcaaaggcgccttacctggagggcttgtcagagccaggactgaaggtgggatctgctgcttgtaacctcaggtccccggatgcgcaccccaacggcgcctgcgcctacgggggcctca

SEQ ID NO: 19836 - DNA, 119 bp, homo sapiens
gcaacgaatgagagacaagtcttaccttcttggagccagtgggtggccgggcgcagacagctcagtaagtgtccagtgtaggagaaggcagaaatgccaggccgggcgcagacagctca
